(19) United States
(12) Patent Application Publication
(10) Pub. No.: US 2010/0003255 A1
(43) Pub. Date: Jan. 7, 2010

(54) GENE EXPRESSION PATTERN PREDICTIVE FOR COLORECTAL CARCINOMAS

(76) Inventors: Roland Croner, Roettenbach (DE); Werner Hohenberger, Herzogenaurach (DE); Bertram Reingruber, Eckental (DE); Berthold Lausen, Erlangen (DE)

Correspondence Address: JENKINS, WILSON, TAYLOR & HUNT, P. A., Suite 1200 UNIVERSITY TOWER, 3100 TOWER BLVD.,, DURHAM, NC, 27707, US

(21) Appl. No.: 12/302,183

(22) PCT Filed: May 23, 2007
(86) PCT No.: PCT/EP2007/055017

§ 371 Date: May 26, 2009

(30) Foreign Application Priority Data
May 24, 2006 (DE) 10 2006 024 416.8

(51) Int. Cl. A61K 39/395; C40B 40/06; C12Q 1/68; C40B 30/00; C40B 40/10; C07K 16/00; A61P 35/00

(52) U.S. Cl. 424/139.1; 506/16; 435/6; 506/7; 506/18; 530/387.9

(57) ABSTRACT

The present invention relates to a micro-array for the prediction of a lymph node metastasis in connection with colorectal carcinoma. The invention further relates to an ex vivo method for predicting a lymph node metastasis in connection with colorectal carcinoma as well as an inhibitor or a modulator suited to treat the metastasing colorectal carcinoma.

[0001] The instant application is a national stage application of PCT/EP2007/055017, filed May 23, 2007, which itself claims the benefit of German Patent Application Serial No. 10 2006 024 416.8, filed May 24, 2006, the disclosure of each of which is incorporated herein by reference in its entirety.

[0002] The present invention relates to a micro-array for the prediction of a lymph node metastasis in connection with colorectal carcinoma. Furthermore, the invention relates to an ex vivo method for predicting a lymph node metastasis in connection with colorectal carcinoma as well as an inhibitor or modulator suited for treating the metastasizing colorectal carcinoma.

### Sequence Listing Provided Electronically

[0003] The Sequence Listing associated with the instant disclosure has been electronically submitted. The electronic sequence listing contains one file named: Substitute1406593_ST25.txt, which is 1,548 kilobytes (measured in MS-Windows) and was created on Mar. 24, 2009. The Sequence Listing is hereby incorporated by reference into the instant disclosure.

[0004] For colorectal carcinoma (CRC), the lymph node metastasis (LNM) is a significant predictive factor. For this reason, the draining lymph nodes will be removed in all tumors by means of surgery. An adjuvant chemotherapy is recommended for patients with LNM. A valid pre-operative imaging detection of LNM, which could result in an individualization of the therapy, is actually not sufficiently possible.

[0005] The colorectal carcinoma is curable depending on its stage. Hereby, the surgical resection represents the decisive therapeutical measure. Besides the broad removal of the primary tumor, the principles of surgical radicalness involve the concept of the elective en bloc lymph node dissection in nearly all colorectal carcinomas (1, 2). This procedure is based on the observation that patient populations are profiting from the removal of the respective area of the tumor-associated lymphatic flow and thus of all potentially afflicted lymph nodes. After a curative operation (R0) during stage III (UICC), the loco-regional recrudescence rates could be reduced to under 5% for the colon carcinoma and to under 10% for the rectal carcinoma when consequently applying these principles of radicalness, as well as the 5-year survival could be increased up to 60.7% (3).

[0006] The conventional pre- and intra-operative staging studies do not allow to detect or predict synchronous or metachronous lymph node metastases in individual cases, respectively. Thus, a differentiation between stages I/II (UICC) and stage III is not possible before having performed the radical lymph node dissection in connection with a histopathological study of the resected tissue. As a result, identical principles of surgical radicalness actually apply for nearly all tumors of the clinical stages I-III.

[0007] Only in a sub-group of stage I (UICC) with small (≦3 cm) polypous pT1 carcinomas without lymph channel invasion (L0) and a lower or moderate degree of differentiation (G1/2), a lymphogenic metastasis (≦3%) can be excluded with adequate certainty due to conventional criteria of imaging and histopathology and a sole local resection (e.g. an endoscopic polypectomy, transrectal excision) can be performed (7).

[0008] A certain pre-operative exclusion of a lymphogenic metastasis would also allow the use of more gentle methods (e.g. endoscopic methods, laparoscopic tubular resections, combined endoscopic and laparoscopic methods, limited open resections) in further tumors in stage I and II (UICC). These little traumatizing invasions would enable an earlier mobilization of the patient and would involve a reduced hospitalization, a reduced need for analgetics and fewer complications during wound healing. Particularly, this would have very major advantages for older patients and patients at high risk for which the consequences of a radical resection are calculable to a lesser extent.

[0009] The actually available criteria for the prediction of the degree of differentiation, the infiltration depth and the lymph channel invasion are not sufficient to make a reliable pre-operative statement about the metastatic potential of colorectal carcinomas. The over-expression of MUC-1, ki67 or MMP-7 in immunohistochemical analyses of tumor tissue supposes a relation to a lymph node metastasis (8, 9, 10). Otherwise, these molecular markers could not be established as independent predictive factors for colorectal carcinomas, yet.

[0010] By using a micro-array analysis, genes could be identified in several studies which are specifically expressed in colorectal carcinomas or the healthy mucosa of the large intestine and thus allow a differentiation of both tissues (4, 5, 6).

[0011] So far, there are only insufficient studies existing in which it has been attempted to determine a predictive gene pattern for a metastasis in colorectal carcinomas. In the first study, the stages UICC II and III could be distinguished from each other via gene expression, however this was not the case for the stages UICC I and III. Furthermore, only 20 cases, each having 5 patients per stage UICC I-IV, had been included. One patient suffered from a familial tumor disease which is not acceptable for such a study, as gene expression can hereby be influenced. An early version of the GeneChip of the Affymetrix company having only 6,800 ProbeSets had been used (11). In a second micro-array study, only 12 patients had been included. Hereby, a cDNA micro-array having 4,608 ProbeSets manufactured for this purpose was used (12). In two additional studies concerning tumor progression, 25 cases were included, respectively. Here, also cases with liver metastasis (stage UICC IV) and even liver metastases themselves were included in the analyses. It has not been enlarged upon a lymph node metastasis (13-14). Due to the sample material's heterogeneity, the gene patterns listed in these papers hereto are questionable and do not show any correlation with the own gene pattern of the present work.

[0012] It is obvious that genes, which are specifically expressed in a particular stage of the colorectal carcinoma, can be involved in the pathologic specification of the respective stage. Hitherto, the patho-functions of stage-associated genes having been isolated by micro-array technology could not systematically be analyzed. This is due to the fact that there are generally identified gene groups (clusters) of genes, the expression of which is associated with a particular tumor stage, when performing comparing studies of gene expression with the micro-array technology. Additionally, combinational effects of these genes have to be considered for pathogenetic studies. However, this also explains why single genes could not have been established for predictive purposes yet. This concerns complex gene patterns for biological functions wherein the interactions of each single gene cause a lymph node metastasis.

[0013] Therefore, it is an object of the present invention to provide a micro-array for the prediction of a lymph node metastasis in connection with colorectal carcinoma and a respective ex vivo method showing an improved predictive value when compared to the test methods known so far. It is another object of the present invention to provide substances which are suitable for treating the metastasizing colorectal carcinoma.

[0014] These objects are solved by the subject-matter of the independent claims. Preferred aspects are given in the dependent claims.

[0015] A predictive gene pattern of 240 genes for a lymph node metastasis could be detected by a micro-array analysis of 40 colorectal carcinomas without (stage UICC I, II) and 40 carcinomas with lymph node metastases (stage UICC III) in the present invention (table 1). The diligent selection of the cases and the exact histological control of the reprocessed tissues and a RNA control assure a corresponding data quality (15). Based on the present gene pattern, the prediction of a lymph node metastasis of 67% has been possible (FIG. 1), wherein the pre-operative radiological diagnostics according to the German Cancer Society Consensus Conference, Bochum, Germany, February 2004 (16), is only 60%. The collective studied represents the largest known number of cases used so far with a micro-array comprising about 22,280 ProbeSets (Affymetrix, HG-U133A). The detected gene set can, e.g., be used on a so called custom-made micro-array for pre-operative diagnostics on tumor biopsy after hybridization.

[0016] Tumor tissue of 40 patients with CRC stage UICC I, II and UICC III, respectively, has immediately been preserved post-operatively. After a macroscopic dissection for the enrichment with cancerous tissue, RNA has been isolated and hybridized on micro-arrays (HG-U133A, Affymetrix). PCR and immunohistochemical analyses have been performed on selected significantly differentially expressed genes.

[0017] The prediction for a LNM in connection with CRC is also possible in the biopsy of the primary tumor due to differentially expressed genes. This is the basis for individual pre-operative diagnostics and therapy planning.

[0018] Except for DCC and the micro-satellite instability, molecular predictive markers have not been established for clinical applications (see chapter “Examples”). Single markers are not able to predict a lymph node metastasis in the primary tumor. For the first time, a pattern of 240 predictive genes for a lymph node metastasis could have been evaluated in a sufficiently large random sample of 80 cases by using GenChip analyses (table 1). On this basis, a prediction for a lymph node metastasis can be carried out by means of a pre-operative biopsy of the primary tumor in future times. The composition of the genes as a specific pattern predicting the lymph node metastasis is hereby decisive (FIG. 1).

[0019] The present invention particularly comprises the following aspects and embodiments:

[0020] According to a first aspect, the invention relates to a micro-array for the prediction of a lymph node metastasis in connection with colorectal carcinoma wherein the micro-array comprises nucleic acids that are able to hybridize to at least a part of the subsequent nucleic acids or to their complementary or reverse or reverse-complementary sequences as well as to RNA sequences derived therefrom or to derivates of these sequences, wherein the nucleic acids at least comprise the nucleotide sequences according to table 2.

[0021] According to one embodiment of the invention, in addition to the afore-mentioned nucleic acids according to table 2, one or more of the nucleotide sequences according to table 1 are used in the micro-array. In other words, the micro-array according to the present invention is based at least on sequences according to table 2, but it can also be based on the sequences listed in table 1. In a preferred embodiment, the micro-array is based on all sequences according to table 1 (i.e. on all 240 sequences). It should be noted that table 1 comprises all sequences according to table 2. If the micro-array is thus based on more than the sequences according to table 2, these additional sequences will naturally be selected from the sequences according to table 1, which are not contained in table 2 yet.

[0022] The single sequences as well as their accession data in databases are detailed in table 1. As mentioned above, the gene composition is hereby decisive as being a specific pattern predicting the lymph node metastasis. The differential gene pattern between colorectal carcinomas without (stage UICC I, II) and with (stage UICC III) lymph node metastases can be seen from FIG. 1. These differences in the gene expression are used by the present invention in order to provide a micro-array and a diagnostic method having a high predictive value with respect to the prediction of a lymph node metastasis in connection with colorectal carcinoma.

[0023] As already mentioned above, in accordance with the present invention, particularly all 240 sequences from table 1 are consulted, it is, however, also possible, to limit the micro-array to sub-groups having an independent predictive value.

[0024] The nucleic acids of the present invention also comprise nucleic acids having sequences substantially being equivalent to the nucleic acids having SEQ ID NO: 1-240 (table 1). Nucleic acids according to the present invention can have, e.g., at least about 80%, typically at least about 90% or 95% sequence identity to the nucleic acids having SEQ ID NO: 1-240.

[0025] The term “micro-array” as used herein is a collective name for molecularbiological testing systems that enable the parallel analysis of up to several hundreds of single detections in a small amount of biological sample material. Special micro-arrays are sometimes also named “gene chips” or “biochips” as they contain numerous information in the smallest place.

[0026] The micro-arrays are primarily differed in DNA micro-arrays and protein micro-arrays.

[0027] Micro-arrays are used to detect the RNA amount of particular genes. There are mainly two different kinds of micro-arrays, on the one hand, there are micro-arrays based on bound cDNA and, on the other hand, there are micro-arrays based on synthetically produced oligonucleotides. These micro-arrays are used as probes which are applied on defined positions in a grid pattern on, e.g., glass carriers.

[0028] The following procedure is usually selected for the analysis:

[0029] At first, RNA is extracted from the patient's sample and transcribed in cDNA or cRNA after optional purification and/or amplification steps of the mRNA and are, for example, marked. Then, it is hybridized with the micro-arrays. In this way, marked cDNA/cRNA units bind to their complementary analoga on the array. After removing the unbound cDNA/cRNA units by washing, the signal of the marker is read by a suitable device in each position of the micro-array.

[0030] In context with the micro-arrays of the present invention, the “nucleic acids of the micro-array” are those sequences being part of the micro-array. They are basically complementary to the sequences of the nucleic acids having SEQ ID NO: 1-240 (being derived from patients' samples) and can, for example, consist of only a smaller segment of these sequences (for example in the case of oligonucleotide probes). Insofar, the term “nucleic acids specifically suited for hybridization” is used to describe those sequences bound to the micro-array which specifically bind to at least a segment of a corresponding nucleic acid sequence according to SEQ ID NO: 1-240.

[0031] According to a preferred embodiment, the nucleic acids having SEQ ID NO: 1-240 are chemically modified in order to enable/facilitate the readout/interpretation of the binding of the corresponding nucleic acids to the complementary nucleic acids of the micro-array. Preferably, there will be used a marker which is particularly selected from a radioactive marker, a fluorescence marker, a biotin marker, a digoxigenin marker, a peroxidase marker or a marker being detectable by alkaline phosphatase.

[0032] The nucleic acids of the micro-array are preferably bound to a solid phase matrix, e.g., a nylon membrane, glass or plastic material.

[0033] The micro-array is preferably a DNA, RNA or PNA array.

[0034] According to a second aspect, the present invention relates to an ex vivo method for predicting a lymph node metastasis in connection with colorectal carcinoma comprising the following steps:
[0035] taking a sample of the tumor tissue of the colorectal carcinoma from the patient;
[0036] extracting the RNA from the sample;
[0037] optionally transcribing the RNA in cDNA or cRNA;
[0038] detecting if the sample contains cDNA or cRNA which corresponds to the nucleic acid sequences according to SEQ ID NO: 1-240 or to one of the sub-groups thereof defined above.

[0039] According to a preferred embodiment, the afore-mentioned sub-groups are the nucleotide sequences according to table 2.

[0040] The detection of the nucleic acid sequences is preferably carried out by PCR, particularly by RT-PCR. The PCR method has the advantage that very small amounts of DNA can be detected. The temperature conditions and numbers of cycles have to be adapted depending on the material to be detected. The optimum reaction conditions can be determined in a well-known matter in manual experiments.

[0041] In the PCR reaction or the RT-PCR as well as in the hybridization reaction, the DNA or RNA, particularly the mRNA, of the sample to be assayed can either be present in an extracted form or in form of complex mixtures in which the DNA or RNA to be assayed only forms a very small part of the fraction of the special biological sample. The cells to be assayed can thus either be present in a purified form or, for example, be “contaminated” in a tissue assembly.

[0042] In the RT-PCR, the oligonucleotides of the invention are used for PCR amplification of fragments to cDNA templates being produced after a reverse transcription of the sample mRNA. The expression can then be evaluated qualitatively in combination with suited standards and techniques, like an internal standard and a quantitative PCR, also quantitatively.

[0043] Alternatively, the detection of the nucleic acids can be performed by complementary nucleic acid probes, preferably cDNA or oligonucleotide probes.

[0044] The nucleic acid probes are preferably able to hybridize to at least a segment of each nucleic acid or to complementary or reverse or reverse-complementary sequences thereof as well as to RNA sequences derived therefrom or derivatives of these sequences.

[0045] According to the present invention, hybridization is preferably carried out under moderately stringent or stringent conditions.

[0046] Stringent hybridization and washing conditions are generally understood as reaction conditions in which there are only produced duplex molecules between oligonucleotides and desired target molecules (perfect hybrids) or the desired target organism is detected, respectively. Stringent hybridization conditions are particularly understood as 0.2×SSC (0.03 M NaCl, 0.0003 M sodium citrate, pH 7) at 65° C. In shorter fragments, for example, oligonucleotides of up to 20 nucleotides, the hybridization temperature is below 65° C., for example, above 55° C., preferably above 60° C., but below 65° C., respectively. Stringent hybridization temperatures depend on the size or the length of the nucleic acid and its nucleotide composition, respectively, and have to be determined by a person skilled in the art by means of manual experiments. Moderately stringent conditions are, for example, reached at 42° C. and washing in 0.2×SSC/0.1% SDS at 42° C.

[0047] Alternatively, the respective nucleic acids can be detected by the proteins expressed therefrom, for example, by specific antibodies.

[0048] According to a third aspect, the present invention provides a method for detecting the expression of the genes specified in table 1 or 2, respectively, comprising the following steps:
[0049] extracting RNA from the patient's sample;
[0050] applying the RNA or nucleic acids derived therefrom on a micro-array as defined above; and
[0051] detecting the hybridization of the RNA or of nucleic acids derived therefrom to the nucleic acids of the micro-array.

[0052] As already described above, besides DNA arrays, there are protein micro-arrays which are also a subject-matter of the present invention. These are also used to predict a lymph node metastasis in connection with colorectal carcinoma, wherein the micro-array is able to detect the amino acid sequences corresponding to the nucleotide sequences of table 1 or 2.

[0053] According to a preferred embodiment, this is an antibody micro-array or a Western Blot micro-array. For example, in antibody micro-arrays, the antibodies are fixed (spotted) and then the sample is applied on the array. As it is used herein, the term “antibody” relates to intact antibodies as well as antibody fragments maintaining a special ability to selectively bind to an epitope. Those fragments comprise, without limitation, Fab, F(ab′)₂, recombinant single chain antibodies and Fv antibody fragments. The term “epitope” relates to any antigen determinant on an antigen onto which the paratope of an antibody binds. Epitope determinants are usually consisting of chemically active surface groups of molecules (for example, amino acid or sugar moieties) and typically have three-dimensional structural characteristics as well as special charge characteristics.

[0054] The antibodies according to the present invention can be produced by using any known method. For example, an amino acid or a fragment thereof expressed by a nucleic acid according to the present invention can be provided and used as an immunogen in order to evoke such an immune reaction in an animal in which specific antibodies will be produced.

[0055] The production of polyclonal antibodies is well-known to a person skilled in the art. See, for example, Green et al., Production of Polyclonal Antisera, in Immunochemical Protocols (Manson, eds.), pages 1-5 (Humana Press 1992) and Coligan et al., Production of Polyclonal Antisera in Rabbits, Rats, Mice and Hamsters, in Current Protocols in Immunology, chapter 2.4.1 (1992). Additionally, a person skilled in the art is aware of several techniques of immunology for purification and concentration of polyclonal antibodies as well as of monoclonal antibodies (Coligan et al., Unit 9, Current Protocols in Immunology, Wiley Interscience, 1994).

[0056] The production of monoclonal antibodies is also well-known to a person skilled in the art. See, for example, Köhler & Milstein, Nature 256: 495 (1975); Coligan et al., chapters 2.5.1-2.6.7; and Harlow et al., Antibodies: A Laboratory Manual, page 726 (Cold Spring Harbor Pub. 1988). Briefly, monoclonal antibodies can be extracted by injecting a composition comprising the amino acids according to the present invention into mice, then verifying the presence of an antibody production by examining a serum sample, removing the spleen for extracting B lymphocytes and fusing the B lymphocytes with myeloma cells for producing hybridomas, cloning the hybridomas, selecting the positive clones producing a monoclonal antibody against the protein and isolating the antibodies from the hybridoma cultures. Monoclonal antibodies can be isolated from hydridoma cultures by a number of well-established techniques and purified. Such isolation techniques include an affinity chromatography with protein A or G Sepharose, size exclusion chromatography and ion exchange chromatography. See, for example, Coligan et al., chapters 2.7.1-2.7.12 and chapter “Immunglobulin G (IgG)” in Methods In Molecular Biology, volume 10, pages 79-104 (Humana Press 1992).

[0057] The micro-array Western method is used to detect antigens in cell lysates of different tissues or in protein fractions extracted by isoelectric focussing. The cell lysate or the protein fraction is spotted on the carrier material of the micro-array, the antibody is applied subsequently. The antibody remains attached in each test panel showing antibody-antigen interaction. Panels with antibodies are then detected like in the Western Blot.

[0058] According to a further aspect, the invention relates to an inhibitor or a modulator of one or more sequences according to table 1 or 2 or of the proteins expressed therefrom. Such substances are used to treat colorectal carcinomas.

[0059] The invention also comprises a pharmaceutical composition comprising one or more of the inhibitors or modulators mentioned-above and a pharmaceutically acceptable carrier. Such a composition can (in addition to the active substances and the carrier) contain diluents, fillers, salts, buffers, stabilizers, solubilizers and other materials well-known in the art. The term “pharmaceutically acceptable” should define a non-toxic material which does not affect the efficiency of the biological activity of the active ingredient or the active substance, respectively. The selection of the carrier depends on the route of administration.

[0060] The pharmaceutical composition can additionally contain further agents enhancing the activity of the active substance or complementing the activity or use thereof during treatment (for example, chemotherapeutics). Such additional factors and/or agents can be contained in the pharmaceutical composition in order to achieve a synergistic effect or to minimize side effects or undesired effects, respectively. Techniques for formulating or preparing and administering the inhibitors/modulators of the present invention can be found in “Remington's Pharmaceutical Sciences”, Mack Publishing Co., Easton, Pa., last edition, respectively. A therapeutically effective dosage further refers to an amount of the compound sufficient to achieve an improvement of the symptoms, for example, a treatment, a healing, prevention or an improvement of such conditions. Suitable routes of administration can, for example, include oral, rectal, transmucosal or intestinal administration and parenteral administration, including intramuscular, subcutan, intramedular injections as well as intrathecal, directly intraventricular, intravenous, intraperitoneal or intranasal injections. The intravenous administration into a patient is preferred. The present invention will now be illustrated by the following examples and the FIGURE.

[0061] FIG. 1 shows a differential gene pattern between colorectal carcinomas without (stage UICC I, II) and with (stage UICC III) lymph node metastases. It shows a headmap for illustrating differentially expressed genes in stage UICC I, II vs. III. Differentially expressed genes are shown in the lines, red: over-expressed, green: under-expressed. The cases of the respective groups UICC I, II and III are shown in the columns. A pattern of differentially expressed genes UICC I, II vs. III can be clearly seen.

### EXAMPLES

[0062] The following summary shows predictive factors in connection with colorectal carcinoma:

Predictive factors in connection with colorectal carcinoma
(College of American Pathologists Consensus Statement 1999)

| Category I | Category IIA | | | |
|---|---|---|---|---|
| (statistically | (verifiably | | Category III | Category IV |
| detected explicit | predictive relevance, | Category IIB | (current data unclear/ | (verifiably no |
| predictive | clinical validation | (promising factors, | studies still | predictive |
| relevance) | to be proven) | data not sufficient) | insufficient) | relevance) |
| pT category | grading | histologic kind of | morphologic | tumor size |
| pN category | | carcinoma | marker: | |
| (AJCC/UICC) | | | perineural invasion | |
| | | | capillary density | |
| | | | (desmoplasia) | |
| | | | peritumoral | |
| | | | inflammatory | |
| | | | reaction | |
| | | | focal | |
| | | | neuroendocrine | |
| | | | differentiation | |
| V category | edges of the | MSI associated | all molecular | |
| (venous invasion) | resected tissue | factors, MSI-H | markers* except for | |
| L category | | | DCC and MSI-H, | |
| (lymph node | | | macroscopic tumor | |
| invasion) | | | configuration | |
| R classification | ypTNM | LOH 18q | all tumor markers* | |
| (residual tumor) | | (loss of DCC | (cell proteins and | |
| | | allele) | carbohydrates) | |
| | | | except for CEA | |
| CEA pre-operative | | configuration of | nuclear | |
| | | tumor edge | organisational | |
| | | | regions | |
| | | | proliferative | |
| | | | markers/index: Ki- | |
| | | | 67, DNA content | |

MSI: micro-satellite instability
CEA: carcinoma-embryonic antigen
ypTNM: y: classification according to radio/chemotherapy; p: pathologic staging
*marker list, see literatureAs specified above, FIG. 1 additionally shows a differential gene pattern between colorectal carcinomas without (stage UICC I, II) and with (stage UICC III) lymph node metastases, red: over-expressed genes, green: under-expressed genes.

[0063] The gene expression of 40 colorectal carcinomas without (stage UICC I and II) and of 40 colorectal carcinomas with lymph node metastases (stage UICC III) was compared in a study by using the Affymetrix GenChip technology. In this way, there could be detected 240 significantly differentially expressed genes UICC I, II vs. UICC III (see table 1). Based on these differentially expressed genes, there could be established a prediction for a lymph node metastasis of about 67% by several statistic models (Croner et al., Cancer 2005). Hitherto, a pre-operative statement about a lymph node metastasis has only been possible by means of imaging diagnostics. A realistic prediction of about 60% can be given herewith (German Cancer Society Consensus Conference, Bochum, Germany, February 2004). Single molecular markers could not be established as predictive relevant markers so far (FIG. 1).

[0064] With the present gene pattern, so-called “custom-made micro-arrays” (lymphchip) can be produced and used for pre-operative diagnostics. Colorectal carcinomas can then be biopsied pre-operatively. The isolated RNA from the tumor biopsies is hybridized to the lymphchip. A statement about a lymph node metastasis can be given depending on the gene expression pattern. On the basis of this information, an individual therapy with respect to operation planning or chemotherapy can be carried out.

TABLE 1
240 differentially expressed genes between colorectal carcinomas without
(stage UICC I, II) und with (stage UICC III) lymph node metastases.
The sequences correspond to SEQ ID NO: 1-240.

| GENBANK ® | | |
|---|---|---|
| accession number | description | P value |
| extracellular matrix | | |
| NM_021721 | a disintegrin and metalloproteinase domain 22 (ADAM22) | <0.001 |
| (SEQ ID NO: 1) | | |
| NM_024333 | fibronectin type III and SPRY domain containing 1 (FSD1) | <0.001 |
| (SEQ ID NO: 2) | | |
| NM_003613 | cartilage intermediate layer protein, nucleotide | <0.05 |
| (SEQ ID NO: 3) | pyrophosphohydrolase (CILP) | |
| NM_003635 | N-deacetylase/N-sulfotransferase (heparan glucosaminyl) 2 (NDST2) | <0.05 |
| (SEQ ID NO: 4) | | |
| cell cycle/mitosis | | |
| NM_000465 | BRCA1 associated RING domain 1 (BARD1) | <0.01 |
| (SEQ ID NO: 5) | | |
| X59065 | fibroblast growth factor 1 (acidic) (FGF1) | <0.01 |
| (SEQ ID NO: 6) | | |
| NM_018055 | nodal homolog (mouse) (NODAL) | <0.01 |
| (SEQ ID NO: 7) | | |
| NM_007370 | replication factor C (activator 1) 5, 36.5 kDa (RFC5) | <0.01 |
| (SEQ ID NO: 8) | | |
| U79302 | tumor protein p53 inducible protein 11 (TP53I11) | <0.05 |
| (SEQ ID NO: 155) | | |
| NM_022094 | cell death-inducing DFFA-like effector c (CIDEC) | <0.05 |
| (SEQ ID NO: 9) | | |
| BF967271 | anaphase promoting complex subunit 5 (ANAPC5) | <0.05 |
| (SEQ ID NO: 156) | | |
| NM_002634 | prohibitin (PHB) | <0.05 |
| (SEQ ID NO: 10) | | |
| AI367319 | SRY (sex determining region Y)-box 10 (SOX10) | <0.05 |
| (SEQ ID NO: 157) | | |
| NM_018165 | polybromo 1 (PB1) | <0.05 |
| (SEQ ID NO: 11) | | |
| AF074717 | RAD1 homolog (S. pombe) (RAD1) | <0.05 |
| (SEQ ID NO: 12) | | |
| NM_016567 | BRCA2 and CDKN1A interacting protein (BCCIP) | <0.05 |
| (SEQ ID NO: 13) | | |
| NM_004708 | programmed cell death 5 (PDCD5) | <0.05 |
| (SEQ ID NO: 14) | | |
| AF277724 | cell division cycle 25C (CDC25C) | <0.05 |
| (SEQ ID NO: 15) | | |
| AI042030 | SMC1 structural maintenance of chromosomes 1-like 1 (yeast) | <0.05 |
| (SEQ ID NO: 158) | (SMC1L1) | |
| AL161955 | triple functional domain (PTPRF interacting) (TRIO) | <0.05 |
| (SEQ ID NO: 159) | | |
| NM_006999 | polymerase (DNA directed) sigma (POLS) | <0.05 |
| (SEQ ID NO: 16) | | |
| NM_001786 | cell division cycle 2, G1 to S and G2 to M (CDC2) | <0.05 |
| (SEQ ID NO: 17) | | |
| NM_002898 | RNA binding motif, single stranded interacting protein 2 (RBMS2) | <0.05 |
| (SEQ ID NO: 18) | | |
| cell adhesion/ | | |
| cytoskeleton | | |
| NM_006262 | peripherin (PRPH) | <0.001 |
| (SEQ ID NO: 19) | | |
| AF312679 | Rhesus blood group, D antigen (RHD) | <0.001 |
| (SEQ ID NO: 20) | | |
| NM_001794 | cadherin 4, type 1, R-cadherin (retinal) (CDH4) | <0.01 |
| (SEQ ID NO: 21) | | |
| NM_030968 | C1q and tumor necrosis factor related protein 1 (C1QTNF1) | <0.01 |
| (SEQ ID NO: 23) | | |
| NM_012216 | midline 2 (MID2) | <0.01 |
| (SEQ ID NO: 24) | | |
| NM_020129 | lectin, galactoside-binding, soluble, 14 (LGALS14) | <0.01 |
| (SEQ ID NO: 25) | | |
| NM_001939 | dystrophin related protein 2 (DRP2) | <0.01 |
| (SEQ ID NO: 26) | | |
| AK001619 | phosphodiesterase 4D interacting protein (myomegalin) (PDE4DIP) | <0.01 |
| (SEQ ID NO: 160) | | |
| AW296788 | microtubule-associated protein 1A (MAP1A) | <0.01 |
| (SEQ ID NO: 161) | | |
| AF152503 | protocadherin gamma subfamily A, 10 (PCDH-gamma-A10) | <0.05 |
| (SEQ ID NO: 27) | | |
| NM_001232 | calsequestrin 2 (cardiac muscle) (CASQ2) | <0.05 |
| (SEQ ID NO: 28) | | |
| NM_000337 | sarcoglycan, delta (35 kDa dystrophin-associated glycoprotein) | <0.05 |
| (SEQ ID NO: 29) | (SGCD) | |
| NM_001944 | desmoglein 3 (pemphigus vulgaris antigen) (DSG3) | <0.05 |
| (SEQ ID NO: 30) | | |
| L20815 | corneodesmosin (CDSN) | <0.05 |
| (SEQ ID NO: 31) | | |
| NM_024883 | R-cadherin (retinal) (CDH4) | <0.015* |
| (SEQ ID NO: 240) | | |
| NM_006580 | claudin 16 (CLDN16) | <0.015* |
| (SEQ ID NO: 22) | | |
| channels/ | | |
| transporters | | |
| NM_020243 | translocase of outer mitochondrial membrane 22 homolog (yeast) | <0.01 |
| (SEQ ID NO: 32) | (TOMM22) | |
| N80922 | solute carrier family 35, member D1 (SLC35D1) | <0.05 |
| (SEQ ID NO: 162) | | |
| AF087138 | ATP-binding cassette, sub-family C (CFTR/MRP), member 8 | <0.05 |
| (SEQ ID NO: 163) | (ABCC8) | |
| NM_005895 | golgi autoantigen, golgin subfamily a, 3 (GOLGA3) | <0.05 |
| (SEQ ID NO: 33) | | |
| AW086154 | golgi associated, gamma adaptin ear containing, ARF binding protein | <0.05 |
| (SEQ ID NO: 164) | 2 (GGA2) | |
| U72069 | transportin 1 (TNPO1) | <0.05 |
| (SEQ ID NO: 165) | | |
| NM_024844 | pericentrin 1 (PCNT1) | <0.05 |
| (SEQ ID NO: 166) | | |
| AF047338 | solute carrier family 12, member 4 (SLC12A4) | <0.015* |
| (SEQ ID NO: 206) | | |
| AB046836 | transient receptor potential cation channel (TRPM3) | <0.015* |
| (SEQ ID NO: 207) | | |
| NM_007357 | component of oligomeric golgi complex 2 (COG2) | <0.015* |
| (SEQ ID NO: 208) | | |
| signal transduction | | |
| AA393484 | phospholipase C, beta 1 (phosphoinositide-specific) (PLCB1) | <0.001 |
| (SEQ ID NO: 167) | | |
| AY024365 | integrin-linked kinase-associated serine/threonine phosphatase 2C | <0.001 |
| (SEQ ID NO: 34) | (ILKAP) | |
| BE466525 | ecotropic viral integration site 1 (EVI1) | <0.001 |
| (SEQ ID NO: 168) | | |
| M15887 | diazepam binding inhibitor (DBI) | <0.001 |
| (SEQ ID NO: 35) | | |
| NM_030959 | olfactory receptor, family 12, subfamily D, member 3 (OR12D3) | <0.001 |
| (SEQ ID NO: 36) | | |
| NM_000541 | S-antigen, retina and pineal gland (arrestin) (SAG) | <0.01 |
| (SEQ ID NO: 37) | | |
| NM_014286 | frequenin homolog (Drosophila) (FREQ) | <0.01 |
| (SEQ ID NO: 38) | | |
| NM_016151 | TAO kinase 2 (TAOK2) | <0.01 |
| (SEQ ID NO: 39) | | |
| AF095723 | G protein-coupled receptors 51(GPR51) | <0.01 |
| (SEQ ID NO: 169) | | |
| AF015731 | glutamate receptor, ionotropic, N-methyl D-aspartate 1 (GRIN1) | <0.01 |
| (SEQ ID NO: 40) | | |
| AC004794 | olfactory receptor, family 1, subfamily I, member 1 (OR1I1) | <0.01 |
| (SEQ ID NO: 170) | | |
| AW138374 | Ras homolog enriched in brain (RHEB) | <0.01 |
| (SEQ ID NO: 171) | | |
| NM_002082 | G protein-coupled receptor kinase 6 (GRK6) | <0.01 |
| (SEQ ID NO: 41) | | |
| NM_016087 | wingless-type MMTV integration site family, member 16 (WNT16) | <0.05 |
| (SEQ ID NO: 42) | | |
| AI218134 | wingless-type MMTV integration site family, member 6 (WNT6) | <0.05 |
| (SEQ ID NO: 172) | | |
| AL050219 | immunoglobulin superfamily, member 4B (IGSF4B) | <0.05 |
| (SEQ ID NO: 173) | | |
| NM_003027 | SH3-domain GRB2-like 3 (SH3GL3) | <0.05 |
| (SEQ ID NO: 43) | | |
| M37981 | cholinergic receptor, nicotinic, alpha polypeptide 3 (CHRNA3) | <0.05 |
| (SEQ ID NO: 44) | | |
| AF229166 | docking protein 1, 62 kDa (downstream of tyrosine kinase 1) (DOK1) | <0.05 |
| (SEQ ID NO: 45) | | |
| NM_020548 | diazepam binding inhibitor (DBI) | <0.05 |
| (SEQ ID NO: 46) | | |
| AA459867 | olfactory receptor, family 7, subfamily E, member 156 pseudogene | <0.05 |
| (SEQ ID NO: 47) | (OR7E156P) | |
| AB000277 | discs, large (Drosophila) homolog-associated protein 1 (DLGAP1) | <0.05 |
| (SEQ ID NO: 48) | | |
| NM_021783 | ectodysplasin A2 receptor (EDA2R) | <0.05 |
| (SEQ ID NO: 49) | | |
| NM_012348 | olfactory receptor, family 2, subfamily N, member 1 pseudogene | <0.05 |
| (SEQ ID NO: 50) | (OR2N1P) | |
| NM_022644 | chorionic somatomammotropin hormone 2 (CSH2) | <0.05 |
| (SEQ ID NO: 51) | | |
| NM_016340 | Rap guanine nucleotide exchange factor (GEF) 6 (RAPGEF6) | <0.05 |
| (SEQ ID NO: 52) | | |
| NM_005754 | Ras-GTPase-activating protein SH3-domain-binding protein (G3BP) | <0.05 |
| (SEQ ID NO: 53) | | |
| AW192876 | casein kinase 1, epsilon (CSNK1E) | <0.05 |
| (SEQ ID NO: 54) | | |
| NM_000529 | melanocortin 2 receptor (adrenocorticotropic hormone) (MC2R) | <0.05 |
| (SEQ ID NO: 55) | | |
| AK022494 | RAB3 GTPase-activating protein (RAB3GAP) | <0.05 |
| (SEQ ID NO: 174) | | |
| NM_003696 | olfactory receptor, family 6, subfamily A, member 2 (OR6A2) | <0.05 |
| (SEQ ID NO: 56) | | |
| NM_005374 | membrane protein, palmitoylated 2 (MPP2) | <0.015* |
| (SEQ ID NO: 209) | | |
| NM_001883 | corticotropin releasing hormone receptor 2 (CRHR2) | <0.015* |
| (SEQ ID NO: 210) | | |
| NM_022559 | growth hormone 1 (GH1) | <0.015* |
| (SEQ ID NO: 211) | | |
| M95489 | follicle stimulating hormone receptor (FSHR) | <0.015* |
| (SEQ ID NO: 212) | | |
| metabolism | | |
| NM_014222 | NADH dehydrogenase (ubiquinone) 1 alpha subcomplex, 8, 19 kDa | <0.001 |
| (SEQ ID NO: 57) | (NDUFA8) | |
| AI252582 | ATPase, H+ transporting, lysosomal 9 kDa, V0 subunit (ATP6V0E) | <0.001 |
| (SEQ ID NO: 175) | | |
| M29873 | cytochrome P450, family 2, subfamily B, polypeptide 7 pseudogene 1 | <0.001 |
| (SEQ ID NO: 58) | (CYP2B7P1) | |
| NM_000284 | pyruvate dehydrogenase (lipoamide) alpha 1 (PDHA1) | <0.01 |
| (SEQ ID NO: 59) | | |
| AF000381 | folate receptor 1 (adult) (FOLR1) | <0.01 |
| (SEQ ID NO: 60) | | |
| AW024233 | glycine-N-acyltransferase (GLYAT) | <0.01 |
| (SEQ ID NO: 61) | | |
| M33318 | cytochrome P450, family 2, subfamily A, polypeptide 6 (CYP2A6) | <0.01 |
| (SEQ ID NO: 62) | | |
| Z97630 | glycine C-acetyltransferase (2-amino-3-ketobutyrate coenzyme A | <0.01 |
| (SEQ ID NO: 176) | ligase) (GCAT) | |
| NM_001740 | calbindin 2, 29 kDa (calretinin) (CALB2) | <0.01 |
| (SEQ ID NO: 63) | | |
| D13119 | ATP synthase, H+ transporting, mitochondrial F0 complex, subunit c | <0.05 |
| (SEQ ID NO: 64) | (ATP5G2) | |
| AA669797 | fumarate hydratase (FH), bone marrow | <0.05 |
| (SEQ ID NO: 65) | | |
| NM_000143 | fumarate hydratase (FH), mitochondrial | <0.05 |
| (SEQ ID NO: 66) | | |
| BC005270 | NADH dehydrogenase (ubiquinone) Fe—S protein 4, 18 kDa | <0.05 |
| (SEQ ID NO: 67) | (NDUFS4) | |
| AB018272 | ubiquitin specific protease 34 (USP34) | <0.05 |
| (SEQ ID NO: 177) | | |
| J04178 | hexosaminidase A (alpha polypeptide) (HEXA) | <0.05 |
| (SEQ ID NO: 68) | | |
| NM_005917 | malate dehydrogenase 1, NAD (soluble) (MDH1) | <0.05 |
| (SEQ ID NO: 69) | | |
| NM_001190 | branched chain aminotransferase 2, mitochondrial (BCAT2) | <0.05 |
| (SEQ ID NO: 70) | | |
| AY028632 | catalase (CAT) | <0.05 |
| (SEQ ID NO: 71) | | |
| NM_003000 | succinate dehydrogenase complex, subunit B, iron sulfur (Ip) | <0.05 |
| (SEQ ID NO: 72) | (SDHB) | |
| NM_001869 | carboxypeptidase A2 (pancreatic) (CPA2) | <0.05 |
| (SEQ ID NO: 73) | | |
| NM_004547 | NADH dehydrogenase (ubiquinone) 1 beta subcomplex, 4, 15 kDa | <0.05 |
| (SEQ ID NO: 74) | (NDUFB4) | |
| NM_000281 | 6-pyruvoyl-tetrahydropterin synthase (PCBD) | <0.05 |
| (SEQ ID NO: 75) | | |
| N71116 | phospholipase A2, group IVB (cytosolic) (PLA2G4B) | <0.05 |
| (SEQ ID NO: 178) | | |
| NM_000818 | glutamate decarboxylase 2 (pancreatic islets and brain, 65 kDa) | <0.05 |
| (SEQ ID NO: 76) | (GAD2) | |
| AF280110 | cytochrome P450, family 3, subfamily A, polypeptide 43 (CYP3A43) | <0.05 |
| (SEQ ID NO: 77) | | |
| BC006229 | cytochrome c oxidase subunit Vb (COX5B) | <0.05 |
| (SEQ ID NO: 78) | | |
| M64992 | proteasome (prosome, macropain) subunit, alpha type, 1 (PSMA1) | <0.05 |
| (SEQ ID NO: 79) | | |
| NM_000055 | butyrylcholinesterase (BCHE) | <0.015* |
| (SEQ ID NO: 213) | | |
| miscellaneous | | |
| NM_014814 | proteasome regulatory particle subunit p44S10 (PSMD6) | <0.001 |
| (SEQ ID NO: 80) | | |
| NM_001189 | bagpipe homeobox homolog 1 (Drosophila) (BAPX1) | <0.001 |
| (SEQ ID NO: 81) | | |
| NM_006839 | inner membrane protein, mitochondrial (mitofilin) (IMMT) | <0.001 |
| (SEQ ID NO: 82) | | |
| AI278616 | SET translocation (myeloid leukemia-associated) (SET) | <0.01 |
| (SEQ ID NO: 83) | | |
| NM_003171 | suppressor of var1, 3-like 1 (S. cerevisiae) (SUPV3L1) | <0.01 |
| (SEQ ID NO: 84) | | |
| NM_006604 | ret finger protein-like 3 (RFPL3) | <0.01 |
| (SEQ ID NO: 85) | | |
| NM_004960 | fusion (involved in t(12, 16) in malignant liposarcoma) (FUS) | <0.01 |
| (SEQ ID NO: 86) | | |
| AK026273 | FK506 binding protein 1B (FKBP1B) | <0.01 |
| (SEQ ID NO: 179) | | |
| NM_007011 | abhydrolase domain containing 2 (ABHD2) | <0.01 |
| (SEQ ID NO: 87) | | |
| BC006466 | diazepam binding inhibitor (DBI) | <0.01 |
| (SEQ ID NO: 88) | | |
| NM_019009 | toll interacting protein (TOLLIP) | <0.05 |
| (SEQ ID NO: 89) | | |
| NM_021922 | Fanconi anemia, complementation group E (FANCE) | <0.05 |
| (SEQ ID NO: 90) | | |
| AL581473 | exosome component 7 (EXOSC7) | <0.05 |
| (SEQ ID NO: 180) | | |
| NM_012123 | mitochondrial translation optimization 1 homolog (S. cerevisiae) | <0.05 |
| (SEQ ID NO: 91) | (MTO1) | |
| BC003170 | ubiquitin associated protein 2-like (UBAP2L) | <0.05 |
| (SEQ ID NO: 92) | | |
| AF073483 | basophilic leukemia expressed protein BLES03 (Bles03) | <0.05 |
| (SEQ ID NO: 181) | | |
| U13395 | WW domain containing oxidoreductase (WWOX) | <0.05 |
| (SEQ ID NO: 93) | | |
| X55503 | metallothionein IV (MT4) | <0.05 |
| (SEQ ID NO: 94) | | |
| AK024944 | mediator of RNA polymerase II transcription, subunit 28 homolog | <0.05 |
| (SEQ ID NO: 182) | (MED28) | |
| AF263541 | dual-specificity tyrosine-(Y)-phosphorylation regulated kinase 4 | <0.05 |
| (SEQ ID NO: 95) | (DYRK4) | |
| U67122 | SMT3 suppressor of mif two 3 homolog 1 (yeast) (SUMO1) | <0.05 |
| (SEQ ID NO: 96) | | |
| NM_018234 | dudulin 2 (TSAP6) | <0.05 |
| (SEQ ID NO: 183) | | |
| NM_003905 | amyloid beta precursor protein binding protein 1, 59 kDa (APPBP1) | <0.05 |
| (SEQ ID NO: 97) | | |
| AK024527 | FLJ20874 fis, clone ADKA02818 | <0.05 |
| (SEQ ID NO: 98) | | |
| AF168617 | sperm associated antigen 11 (SPAG11) | <0.015* |
| (SEQ ID NO: 214) | | |
| BC006333 | tripartite motif-containing 14 (TRIM14) | <0.015* |
| (SEQ ID NO: 215) | | |
| NM_007009 | zona pellucida binding protein (ZPBP) | <0.015* |
| (SEQ ID NO: 216) | | |
| NM_014420 | dickkopf (Xenopus laevis) homolog 4 (DKK4) | <0.01 |
| (SEQ ID NO: 217) | | |
| X98568 | Type X collagen gene | <0.01 |
| (SEQ ID NO: 218) | | |
| BC000340 | melanoma antigen, family A, 3, clone MGC: 8564 | <0.01 |
| (SEQ ID NO: 219) | | |
| NM_005940 | matrix metalloproteinase 11 (stromelysin 3) (MMP11) | <0.01 |
| (SEQ ID NO: 220) | | |
| NM_013307 | non-functional folate binding protein (HSAF000381) | <0.01 |
| (SEQ ID NO: 221) | | |
| NM_018678 | lipopolysaccharide specific response-68 protein (LSR68) | <0.01 |
| (SEQ ID NO: 222) | | |
| AF036973 | HLA complex group 4 pseudogene 6 (HCG4P6) | <0.015* |
| (SEQ ID NO: 223) | | |
| function unknown | | |
| H61826 | Tularik gene 1, NIK and IKK binding protein (NIBP) | <0.001 |
| (SEQ ID NO: 184) | | |
| BF223370 | hypothetical protein MGC11332 (MGC11332) | <0.01 |
| (SEQ ID NO: 99) | | |
| N64803 | trinucleotide repeat containing 6B (TNRC6B) | <0.01 |
| (SEQ ID NO: 185) | | |
| NM_016458 | chromosome 8 open reading frame 30A (LOC51236) | <0.01 |
| (SEQ ID NO: 186) | | |
| BF055496 | DKFZP586J0619 protein (DKFZP586J0619) | <0.01 |
| (SEQ ID NO: 187) | | |
| NM_004939 | DEAD (Asp-Glu-Ala-Asp) box polypeptide 1 (DDX1) | <0.01 |
| (SEQ ID NO: 100) | | |
| AK001854 | KIAA0931 protein (PHLPPL) | <0.01 |
| (SEQ ID NO: 188) | | |
| AL137303 | KIAA1055 protein (KIAA1055) | <0.01 |
| (SEQ ID NO: 189) | | |
| AW014299 | hypothetical protein MGC13098 (MGC13098) | <0.01 |
| (SEQ ID NO: 101) | | |
| AW025284 | hypothetical protein LOC222070 (LOC222070) | <0.01 |
| (SEQ ID NO: 102) | | |
| AK025343 | hepatocellular carcinoma-related HCRP1 (HCRP1) | <0.01 |
| (SEQ ID NO: 190) | | |
| AB023170 | KIAA0953 (KIAA0953) | <0.05 |
| (SEQ ID NO: 103) | | |
| AK027146 | hypothetical LOC388650 (LOC388650) | <0.05 |
| (SEQ ID NO: 104) | | |
| AK025833 | CD33 antigen-like 3 (CD33L3) | <0.05 |
| (SEQ ID NO: 191) | | |
| NM_018253 | YY1 associated protein (YAP) | <0.05 |
| (SEQ ID NO: 105) | | |
| AI431902 | hypothetical protein FLJ13491 (FLJ13491) | <0.05 |
| (SEQ ID NO: 106) | | |
| AK022688 | KIAA0863 protein (KIAA0863) | <0.05 |
| (SEQ ID NO: 192) | | |
| AK026465 | FLJ22812 fis (FLJ22812) | <0.05 |
| (SEQ ID NO: 107) | | |
| NM_017700 | hypothetical protein FLJ20184 | <0.05 |
| (SEQ ID NO: 108) | | |
| NM_024519 | hypothetical protein FLJ13725 | <0.05 |
| (SEQ ID NO: 193) | | |
| NM_024035 | hypothetical protein MGC3113 | <0.05 |
| (SEQ ID NO: 109) | | |
| U72513 | RPL13-2 pseudogene (LOC283345) | <0.05 |
| (SEQ ID NO: 110) | | |
| BF436315 | Nedd4 binding protein 1 (N4BP1) | <0.05 |
| (SEQ ID NO: 194) | | |
| AL031228 | DNA segment on chromosome 6 (D6S2723E) | <0.05 |
| (SEQ ID NO: 111) | | |
| NM_018053 | hypothetical protein FLJ10307 (FLJ10307) | <0.05 |
| (SEQ ID NO: 195) | | |
| AF334946 | FKSG44 gene (FKSG44) | <0.05 |
| (SEQ ID NO: 112) | | |
| NM_022371 | torsin family 3, member A (TOR3A) | <0.05 |
| (SEQ ID NO: 113) | | |
| NM_004209 | synaptogyrin 3 (SYNGR3) | <0.05 |
| (SEQ ID NO: 114) | | |
| AF052091 | BTB (POZ) domain containing 9 (BTBD9) | <0.05 |
| (SEQ ID NO: 196) | | |
| AK000834 | FLJ20827 fis (FLJ20827) | <0.05 |
| (SEQ ID NO: 115) | | |
| AL022101 | hypothetical protein LOC343070 (LOC343070) | <0.05 |
| (SEQ ID NO: 116) | | |
| U79458 | WW domain binding protein 2 (WBP2) | <0.05 |
| (SEQ ID NO: 117) | | |
| BC005078 | hypothetical protein FLJ10996 (FLJ10996) | <0.05 |
| (SEQ ID NO: 118) | | |
| NM_025125 | chromosome 10 open reading frame 57 (C10orf57) | <0.05 |
| (SEQ ID NO: 119) | | |
| AF225421 | HT017 protein (HT017) | <0.05 |
| (SEQ ID NO: 120) | | |
| AL050370 | hypothetical protein FLJ33790 (FLJ33790) | <0.05 |
| (SEQ ID NO: 121) | | |
| AB051441 | KIAA1654 protein (KIAA1654) | <0.05 |
| (SEQ ID NO: 122) | | |
| AB051447 | KIAA1660 protein (KIAA1660) | <0.05 |
| (SEQ ID NO: 123) | | |
| NM_024037 | hypothetical protein MGC2603 (MGC2603) | <0.05 |
| (SEQ ID NO: 197) | | |
| AL024509 | 60S Ribosomal Protein L21 pseudogene (HNRPA3) | <0.05 |
| (SEQ ID NO: 124) | | |
| X72882 | KIAA0409 protein (KIAA0409) | <0.05 |
| (SEQ ID NO: 198) | | |
| AL137435 | hypothetical gene carriered by AL137435 (LOC142779) | <0.05 |
| (SEQ ID NO: 125) | | |
| AW003733 | Ras homolog gene family, member D (RHOD) | <0.05 |
| (SEQ ID NO: 126) | | |
| AL137475 | DKFZp434F0723 protein (DKFZp434F0723) | <0.05 |
| (SEQ ID NO: 127) | | |
| NM_025094 | hypothetical protein FLJ22184 (FLJ22184) | <0.05 |
| (SEQ ID NO: 128) | | |
| NM_025052 | Yeast Sps1/Ste20-related kinase 4 (YSK4) | <0.05 |
| (SEQ ID NO: 129) | | |
| NM_006010 | arginine-rich, mutated in early stage tumors (ARMET) | <0.05 |
| (SEQ ID NO: 130) | | |
| AK025127 | SATB family member 2 (SATB2) | <0.05 |
| (SEQ ID NO: 199) | | |
| AK024527 | FLJ20874 fis, clone ADKA02818 (AK024527) | <0.05 |
| (SEQ ID NO: 98) | | |
| NM_014118 | Glycosyltransferase-like domain containing 1 (GTDC1) | <0.05 |
| (SEQ ID NO: 131) | | |
| BC000978 | FLJ20259 (FLJ20259) | <0.015* |
| (SEQ ID NO: 224) | | |
| N55205 | hemoglobin, beta pseudogene 1 (HBBP1) | <0.015* |
| (SEQ ID NO: 225) | | |
| NM_024748 | FLJ11539 (FLJ11539) | <0.015* |
| (SEQ ID NO: 226) | | |
| AF288389 | glycosyltransferase 25 domain containing 2 (GLT25D2) | <0.015* |
| (SEQ ID NO: 227) | | |
| AL121891 | U-box domain containing 5 (UBOX5) | <0.015* |
| (SEQ ID NO: 228) | | |
| AF070610 | clone 24505 (BEAN) | <0.015* |
| (SEQ ID NO: 229) | | |
| D85939 | craniofacial development protein 1 (CFDP1) | <0.015* |
| (SEQ ID NO: 230) | | |
| D38081 | thromboxane A2 receptor (TBXA2R) | <0.015* |
| (SEQ ID NO: 231) | | |
| AI263044 | qz29e03.x1 NCI_CGAP_Kid11 cDNA clone | <0.015* |
| (SEQ ID NO: 232) | | |
| NM_014772 | KIAA0427 (KIAA0427) | <0.015* |
| (SEQ ID NO: 233) | | |
| U85995 | parathyroid hormone-responsive B1 (PTHB1) | <0.015* |
| (SEQ ID NO: 234) | | |
| AW975818 | YTH domain containing 2 (YTHDC2) | <0.015* |
| (SEQ ID NO: 235) | | |
| NM_024593 | EF-hand calcium binding domain 1 (EFCAB1) | <0.015* |
| (SEQ ID NO: 236) | | |
| BF968960 | TM2 domain containing 1 (TM2D1) | <0.015* |
| (SEQ ID NO: 237) | | |
| AF151022 | HSPC 188 | <0.015* |
| (SEQ ID NO: 238) | | |
| protein synthesis | | |
| AF279891 | DEAH (Asp-Glu-Ala-His) box polypeptide 15 (DHX15) | <0.001 |
| (SEQ ID NO: 132) | | |
| D21851 | leucyl-tRNA synthetase 2, mitochondrial (LARS2) | <0.001 |
| (SEQ ID NO: 200) | | |
| NM_002372 | mannosidase, alpha, class 2A, member 1 (MAN2A1) | <0.01 |
| (SEQ ID NO: 133) | | |
| NM_007362 | nuclear cap binding protein subunit 2, 20 kDa (NCBP2) | <0.01 |
| (SEQ ID NO: 134) | | |
| NM_022163 | mitochondrial ribosomal protein L46 (MRPL46) | <0.05 |
| (SEQ ID NO: 135) | | |
| AW118072 | signal recognition particle receptor, B subunit (SRPRB) | <0.05 |
| (SEQ ID NO: 201) | | |
| NM_005826 | heterogeneous nuclear ribonucleoprotein R (HNRPR) | <0.05 |
| (SEQ ID NO: 136) | | |
| BF195526 | heterogeneous nuclear ribonucleoprotein A3 (HNRPA3P1) | <0.05 |
| (SEQ ID NO: 202) | | |
| BF033354 | splicing factor, arginine/serine-rich 7, 35 kDa (SFRS7) | <0.05 |
| (SEQ ID NO: 203) | | |
| NM_001029 | ribosomal protein S26 (RPS26) | <0.05 |
| (SEQ ID NO: 137) | | |
| NM_001357 | DEAH (Asp-Glu-Ala-His) box polypeptide 9 (DHX9) | <0.05 |
| (SEQ ID NO: 138) | | |
| NM_020191 | mitochondrial ribosomal protein S22 (MRPS22) | <0.05 |
| (SEQ ID NO: 139) | | |
| NM_013417 | isoleucine-tRNA synthetase (LARS) | <0.05 |
| (SEQ ID NO: 140) | | |
| U37689 | polymerase (RNA) II (DNA directed) polypeptide H (POLR2H) | <0.05 |
| (SEQ ID NO: 141) | | |
| gene control | | |
| NM_012317 | leucine zipper, down-regulated in cancer 1 (LDOC1) | <0.001 |
| (SEQ ID NO: 142) | | |
| NM_002967 | scaffold attachment factor B (SAFB) | <0.01 |
| (SEQ ID NO: 143) | | |
| NM_004821 | heart and neural crest derivatives expressed 1 (BARD1) | <0.01 |
| (SEQ ID NO: 144) | | |
| NM_006365 | transcriptional activator of the c-fos promoter (CROC4) | <0.01 |
| (SEQ ID NO: 204) | | |
| BC002818 | synovial sarcoma, X breakpoint 2 (SSX2) | <0.01 |
| (SEQ ID NO: 145) | | |
| NM_014910 | zinc finger protein 507 (ZNF507) | <0.01 |
| (SEQ ID NO: 146) | | |
| AL080144 | ELYS transcription factor-like protein TMBS62 (ELYS) | <0.05 |
| (SEQ ID NO: 205) | | |
| M92439 | leucine-rich PPR-motif containing (LRPPRC) | <0.05 |
| (SEQ ID NO: 147) | | |
| NM_006963 | zinc finger protein 22 (KOX 15) (ZNF22) | <0.05 |
| (SEQ ID NO: 148) | | |
| NM_003927 | methyl-CpG binding domain protein 2 (MBD2) | <0.05 |
| (SEQ ID NO: 149) | | |
| BF530257 | transcriptional activator of the c-fos promoter (CROC4) | <0.05 |
| (SEQ ID NO: 150) | | |
| NM_001189 | bagpipe homeobox homolog 1 (Drosophila) (BAPX1) | <0.015* |
| (SEQ ID NO: 81) | | |
| BC001205 | SIN3 homolog B, transcription regulator (yeast) (SIN3B) | <0.015* |
| (SEQ ID NO: 239) | | |
| immune system | | |
| AF047245 | immunoglobulin lambda locus (IGL) | <0.01 |
| (SEQ ID NO: 151) | | |
| NM_020393 | peptidoglycan recognition protein 4 (PGLYRP4) | <0.01 |
| (SEQ ID NO: 152) | | |
| X95660 | immunoglobulin heavy constant mu (IGHM) | <0.05 |
| (SEQ ID NO: 153) | | |
| AI659611 | inducible T-cell co-stimulator ligand (ICOSL) | <0.05 |
| (SEQ ID NO: 154) | | |

*based on multiple tests on all 22,286 ProbeSets GenChips (Affymetrix HG-U133A).

TABLE 2
a sub-group of 50 nucleic acids reaching a high predictive value in the prediction
of a lymph node metastasis in connection with colorectal carcinoma. p < 0.015
based on multiple tests on all 22,286 ProbeSets GenChips (Affymetrix HG-U133A).

| GENBANK ® | |
|---|---|
| accession number | description |
| cell adhesion/cytoskeleton | |
| NM_021721 | ADAM metallopeptidase domain 22 (ADAM22) |
| (SEQ ID NO: 1) | |
| NM_006262 | peripherin (PRPH) |
| (SEQ ID NO: 19) | |
| NM_024883 | R-cadherin (retinal) (CDH4) |
| (SEQ ID NO: 240) | |
| NM_006580 | claudin 16 (CLDN16) |
| (SEQ ID NO: 22) | |
| transporters/channels | |
| N80922 | Solute carrier family 35, member D1 (SLC35D1) |
| (SEQ ID NO: 162) | |
| AI252582 | ATPase, H+ transporting, lysosomal 9 kDa, V0 subunit (ATP6V0E) |
| (SEQ ID NO: 175) | |
| AF047338 | Solute carrier family 12, member 4 (SLC12A4) |
| (SEQ ID NO: 206) | |
| AB046836 | transient receptor potential cation channel, subfamily M, member 3 (TRPM3) |
| (SEQ ID NO: 207) | |
| NM_007357 | component of oligomeric golgi complex 2 (COG2) |
| (SEQ ID NO: 208) | |
| signal transduction | |
| H61826 | NIK and IKK{beta} binding protein (NIBP) |
| (SEQ ID NO: 184) | |
| NM_030959 | olfactory receptor, family 12, subfamily D, member 3 (OR12D3) |
| (SEQ ID NO: 36) | |
| BE466525 | ecotropic viral integration site 1 (EVI1) |
| (SEQ ID NO: 168) | |
| NM_016087 | wingless-type MMTV integration site family, member 16 (WNT16) |
| (SEQ ID NO: 42) | |
| M95489 | follicle stimulating hormone receptor (FSHR) |
| (SEQ ID NO: 212) | |
| NM_005374 | membrane protein, palmitoylated 2 (MAGUK p55 subfamily member 2) (MPP2) |
| (SEQ ID NO: 209) | |
| NM_001883 | corticotropin releasing hormone receptor 2 (CRHR2) |
| (SEQ ID NO: 210) | |
| NM_022559 | growth hormone 1 (GH1) |
| (SEQ ID NO: 211) | |
| D38081 | thromboxane A2 receptor (TBXA2R) |
| (SEQ ID NO: 231) | |
| metabolism | |
| NM_014222 | NADH dehydrogenase (ubiquinone) 1 alpha subcomplex, 8, 19 kDa (NDUFA8) |
| (SEQ ID NO: 57) | |
| AW024233 | glycine-N-acyltransferase (GLYAT) |
| (SEQ ID NO: 61) | |
| NM_014814 | proteasome (prosome, macropain) 26S subunit, non-ATPase, 6 (PSMD6) |
| (SEQ ID NO: 80) | |
| NM_000055 | butyrylcholinesterase (BCHE) |
| (SEQ ID NO: 213) | |
| protein synthesis | |
| AF279891 | DEAH (Asp-Glu-Ala-His) box polypeptide 15 (DHX15) |
| (SEQ ID NO: 132) | |
| D21851 | leucyl-tRNA synthetase 2, mitochondrial (LARS2) |
| (SEQ ID NO: 200) | |
| gene control | |
| NM_001189 | bagpipe homeobox homolog 1 (Drosophila) (BAPX1) |
| (SEQ ID NO: 81) | |
| BC001205 | SIN3 homolog B, transcription regulator (yeast) (SIN3B) |
| (SEQ ID NO: 239) | |
| immune system | |
| NM_020393 | peptidoglycan recognition protein 4 (PGLYRP4) |
| (SEQ ID NO: 152) | |
| miscellaneous | |
| AF168617 | sperm associated antigen 11 (SPAG11) |
| (SEQ ID NO: 214) | |
| BC006333 | tripartite motif-containing 14 (TRIM14) |
| (SEQ ID NO: 215) | |
| NM_007009 | zona pellucida binding protein (ZPBP) |
| (SEQ ID NO: 216) | |
| M29873 | cytochrome P450, family 2, subfamily B, polypeptide 7 pseudogene 1 |
| (SEQ ID NO: 58) | (CYP2B7P1) |
| N55205 | hemoglobin, beta pseudogene 1 (HBBP1) |
| (SEQ ID NO: 225) | |
| AF036973 | HLA complex group 4 pseudogene 6 (HCG4P6) |
| (SEQ ID NO: 223) | |
| function unknown | |
| N64803 | trinucleotide repeat containing 6B (TNRC6B) |
| (SEQ ID NO: 185) | |
| NM_016458 | chromosome 8 open reading frame 30A (LOC51236) |
| (SEQ ID NO: 186) | |
| NM_006604 | ret finger protein-like 3 (RFPL3) |
| (SEQ ID NO: 85) | |
| NM_024333 | fibronectin type III and SPRY domain containing 1 (FSD1) |
| (SEQ ID NO: 2) | |
| BC000978 | FLJ20259 (FLJ20259) |
| (SEQ ID NO: 224) | |
| NM_024748 | FLJ11539 (FLJ11539) |
| (SEQ ID NO: 226) | |
| AF288389 | glycosyltransferase 25 domain containing 2 (GLT25D2) |
| (SEQ ID NO: 227) | |
| AL121891 | U-box domain containing 5 (UBOX5) |
| (SEQ ID NO: 228) | |
| AF070610 | Clone 24505 (BEAN) |
| (SEQ ID NO: 229) | |
| D85939 | craniofacial development protein 1 (CFDP1) |
| (SEQ ID NO: 230) | |
| AI263044 | qz29e03.x1 NCI_CGAP_Kid11 cDNA clone |
| (SEQ ID NO: 232) | |
| NM_014772 | KIAA0427 (KIAA0427) |
| (SEQ ID NO: 233) | |
| U85995 | parathyroid hormone-responsive B1 (PTHB1) |
| (SEQ ID NO: 234) | |
| AW975818 | YTH domain containing 2 (YTHDC2) |
| (SEQ ID NO: 235) | |
| NM_024593 | EF-hand calcium binding domain 1 (EFCAB1) |
| (SEQ ID NO: 236) | |
| BF968960 | TM2 domain containing 1 (TM2D1) |
| (SEQ ID NO: 237) | |
| AF151022 | HSPC 188 |
| (SEQ ID NO: 238) | |

[0065] A list of the sequences of the sequences listed in table 1 and 2 is given in the Sequence Listing. All sequences are derived from humans (Homo sapiens).

### LITERATURE

[0066] 1. Hohenberger W: The effect of specialization or organisation of rectal cancer surgery; in: Rectal Cancer Surgery, Optimisation, Standardisation, Documentation. Springer Verlag Berlin Heidelberg, Soreide O, Norstein J (eds) pp 353-363 (1997)
[0067] 2. Hohenberger W. Schick Ch, Göhl J: Mesorectal lymph node dissection: is it beneficial? Langenbeck's Arch Surg 383: 402-408 (1998)
[0068] 3. Hermanek P. Wichelt H. Staimmer D, Riedl St. and the German Study Group Colo-Rectal Carcinoma (SGCRC): Prognostic factors of rectum carcinoma—experience of the German multicentre study SGCRC Tumori 81 Supplement: 60-64; (1995)
[0069] 4. Birkenkamp-Demtroder, K., L. L. Christensen, et al. (2002). “Gene expression in colorectal cancer.” Cancer Res 62: 4352-63.
[0070] 5. Notterman, D. A., U. Alon, et al. (2001). “Transcriptional gene expression profiles of colorectal adenoma, adenocarcinoma, and normal tissue examined by oligonucleotide arrays.” Cancer Res 61: 3124-30.
[0071] 6. Croner R S, Foertsch T, Brueckl W M, Guenther K, Siebenhaar R, Matzel K E, Kirchner T, Behrens J, Klein-Hitpass L, Stuerzl M, Hohenberger W and Reingruber B. Common denominator genes that distinguish colorectal mucosa from carcinoma. Int J Colorectal Disease, Epub ahead of print 22.12.2004
[0072] 7. S. Merkel, C. Rödel, W. Hohenberger. Colorectal Carcinoma-Surgical treatment. Endo heute 2004; 17:97-103.
[0073] 8. Tanaka S, Haruma K, Tatsuta S, Hiraga Y, Teixeira C R, Shimamoto F, Yoshihara M, Sumii K, Kajiyama G. Proliferating cell nuclear antigen expression correlates with the metastatic potential of submucosal invasive colorectal carcinoma. Oncology. 1995 March-April; 52(2): 134-9.
[0074] 9. Aoki R, Tanaka S, Haruma K, Yoshihara M, Sumii K, Kajiyama G, Shimamoto F, Kohno N. MUC-1 expression as a predictor of the curative endoscopic treatment of submucosally invasive colorectal carcinoma. Dis Colon Rectum. 1998 October; 41(10):1262-72.
[0075] 10. Yamamoto H, Iku S, Adachi Y, Imsumran A, Taniguchi H, Nosho K, Horiuchi S, Yoshida M, Itoh F, Imai K. Association of trypsin expression with tumour progression and matrilysin expression in human colorectal cancer. J. Pathol. 2003 February; 199(2):176-84.
[0076] 11. Frederiksen C M, Knudsen S, Laurberg S, Orntoft T F. Classification of Dukes B and C colorectal Cancers using expression arrays. J Cancer Res Clin Oncol (2003) 129:263-271.
[0077] 12. Kwon H C, Kim S H, Roh M S, Kim J S, Lee H S, Choi H J, Jeong J S, Kim H J, Hwang T H. Gene expression profiling in lymph node positive and lymph node negative colorectal cancer. Dis Colon Rectum (2004) 47:141-152.
[0078] 13. Friederichs J, Rosenberg R, Mages J, Janssen K P, Maeckl C, Nekarda H, Holzmann B, Siewert J R. Gene expression profiles of different clinical stages of colorectal carcinoma: toward a molecular genetic understanding of tumor progression. Int J Colorectal Dis (2005) 20:391-402.
[0079] 14. Koehler A, Bataille F, Schmid C, Ruemmele P, Waldeck A, Blaszyk H, Hartmann A, Hofstaedter F, Dietmaier W. Gene expression profiling of colorectal cancer and metastases divides tumours according to their clinopathological stage. J Pathol (2004) 204:65-74.
[0080] 15. Croner R S, Foertsch T, Brückl W M, Siebenhaar R, Günther K, Hlubek F, Stremmel C, Hohenberger W, Reingruber B. Tissue preparation for gene expression profiling of colorectal carcinoma—three alternatives to laser microdissection with preamplification. J Lab Clin Med 2004 June; 143 (6):344-351.
[0081] 16. Croner R S, Peters A, Brueckl W M, Matzel K E, Klein-Hitpass L, Brabletz T, Papadopoulos T, Hohenberger W, Reingruber B, Lausen B. Microarray versus conventional prediction of lymph node metastasis in colorectal carcinoma. Cancer 2005; 104(2); 395-404.

1. A micro-array for the prediction of a lymph node metastasis in connection with colorectal carcinoma, wherein the micro-array comprises one or more probes that specifically hybridize to one or more of SEQ ID NOs: 1, 2, 19, 22, 36, 42, 57, 58, 61, 80, 81, 85, 132, 152, 162, 168, 175, 184-186, 200, 206-216, and 223-240, and complements, reverse, and reverse complements thereof.

2. The micro-array according to claim 1, wherein the micro-array further comprises one or more additional probes that specifically hybridize to one or more of SEQ ID NOs: 1-240.

3. The micro-array according to claim 1, wherein the one or more probes present on the micro-array are chemically modified.

4. The micro-array according to claim 3, wherein the one or more probes present on the micro-array are marked.

5. The micro-array according to claim 4, wherein the one or more probes each comprise a marker that is selected from the group consisting of a radioactive marker, a fluorescence marker, a biotin marker, a digoxigenin marker, a peroxidase marker, and a marker that comprises an alkaline phosphatase.

6. The micro-array according to claim 1, wherein the one or more probes of the micro-array are bound to a solid phase matrix.

7. The micro-array according to claim 6, wherein the micro-array is a DNA, RNA, or PNA array.

8. An ex vivo method for predicting a lymph node metastasis in connection with colorectal carcinoma, the method comprising:
providing a patient with a colorectal carcinoma comprising tumor tissue;
isolating a sample of the tumor tissue of the colorectal carcinoma from the patient;
extracting the RNA from the sample;
optionally transcribing the RNA into cDNA or cRNA;
determining if the sample contains an RNA which corresponds to a nucleotide sequence selected from the group consisting of SEQ ID NOs: 1-240,
wherein the determining step is predictive of a lymph node metastasis in the patient.

9. The method according to claim 8, wherein the determining step is carried out by RT-PCR.

10. The method according to claim 8, wherein the determining step is carried out by employing complementary nucleic acid probes.

11. The method according to claim 10, wherein the determining step comprises detecting nucleic acids with nucleic acid probes that specifically hybridize to a segment of each of the nucleic acids; their complementary, reverse, or reverse-complementary sequences; to RNA sequences derived therefrom; or to derivatives thereof.

12. The method according to claim 8, wherein the determining comprises contacting the RNA, or the cDNA or cRNA transcribed therefrom, with a hybridizing nucleotide sequence under moderately stringent conditions.

13. The method according to claim 8, wherein the determining step comprises detecting the presence of a protein encoded by an RNA present in the sample.

14. A method for detecting expression in a tumor in a subject of a nucleic acid comprising a nucleotide sequence as set forth in one or more of SEQ ID NOs: 1-240, the method comprising:
a) extracting RNA from a sample of tumor tissue isolated from a subject;
b) applying the RNA, or a cRNA or a cDNA produced therefrom, to a micro-array, wherein the micro-array comprises one or more probes that specifically hybridize to one or more of SEQ ID NOs: 1, 2, 19, 22, 36, 42, 57, 58, 61, 80, 81, 85, 132, 152, 162, 168, 175, 184-186, 200, 206-216, and 223-240; and
c) detecting hybridization of the RNA, or of the cRNA or the cDNA produced therefrom to one or more of the one or more probes present on the micro-array.

15. A protein micro-array for the prediction of a lymph node metastasis in connection with colorectal carcinoma, wherein the micro-array is able to detect one or more amino acid sequences encoded by one or more of SEQ ID NOs: 1-240.

16. The protein micro-array according to claim 15, wherein the micro-array is an antibody micro-array or a Western Blot micro-array.

17. An inhibitor or modulator of one or more of SEQ ID NOs: 1-240, or of a protein encoded thereby.

18. A pharmaceutical composition comprising one or more inhibitors or modulators according to claim 17 and a pharmaceutically acceptable carrier.

19. The micro-array according to claim 6, wherein the solid phase matrix is selected from the group consisting of a nylon membrane, glass, and a plastic material.

20. The method according to claim 10, wherein the complementary nucleic acid probes comprise a cDNA or an oligonucleotide probe.

The application's sequence listing, which the Patent Office published only in electronic form, follows.

SEQUENCE LISTING (245 sequences)

SEQ ID NO: 1 - DNA, 2636 bp, Homo sapiens
gcggagcgagggaaacggactcggcggcgccggcatgaggagctgagcgtctcgggcgaggcgggctgacggcagcaccatgcaggcggcagtggctgtgtccgtgcccttcttgctgctctgtgtcctggggacctgccctccggcgcgctgcggccaggcaggagacgcctcattgatggagctagagaagaggaaggaaaaccgcttcgtggagcgccagagcatcgtgccactgcgcctcatctaccgctcgggcggcgaagacgaaagtcggcacgacgcgctcgacacgcgggtgcggggcgacctcggtggcccgcagttgactcatgttgaccaagcaagcttccaggttgatgcctttggaacgtcattcattctcgatgtcgtgctaaatcatgatttgctgtcctctgaatacatagagagacacattgaacatggaggcaagactgtggaagttaaaggaggagagcactgttactaccagggccatatccgaggaaaccctgactcatttgttgcattgtcaacatgccacggacttcatgggatgttctatgacgggaaccacacatatctcattgagccagaagaaaatgacactactcaagaggatttccattttcattcagtttacaaatccagactgtttgaattttccttggatgatcttccatctgaatttcagcaagtaaacattactccatcaaaatttattttgaagccaagaccaaaaaggagtaaacggcagcttcgtcgatatcctcgtaatgtagaagaagaaaccaaatacattgaactgatgattgtgaatgatcaccttatgtttaaaaaacatcggctttccgttgtacataccaatacctatgcgaaatctgtggtgaacatggcagatttaatatataaagaccaacttaagaccaggatagtattggttgctatggaaacctgggcgactgacaacaagtttgccatatctgaaaatccattgatcaccctacgtgagtttatgaaatacaggagggattttatcaaagagaaaagtgatgcagttcaccttttttcgggaagtcaatttgagagtagccggagcggggcagcttatattggtgggatttgctcgttgctgaaaggaggaggcgtgaatgaatttgggaaaactgatttaatggctgttacacttgcccagtcattagcccataatattggtattatctcagacaaaagaaagttagcaagtggtgaatgtaaatgcgaggacacgtggtccgggtgcataatgggagacactggctattatcttcctaaaaagttcacccagtgtaatattgaagagtatcatgacttcctgaatagtggaggtggtgcctgccttttcaacaaaccttctaagcttcttgatcctcctgagtgtggcaatggcttcattgaaactggagaggagtgtgattgtggaaccccggccgaatgtgtccttgaaggagcagagtgttgtaagaaatgcaccttgactcaagactctcaatgcagtgacggtctttgctgtaaaaagtgcaagtttcagcctatgggcactgtgtgccgagaagcagtaaatgattgtgatattcgtgaaacgtgctcaggaaattcaagccagtgtgcccctaatattcataaaatggatggatattcatgtgatggtgttcagggaatttgctttggaggaagatgcaaaaccagagatagacaatgcaaatacatttgggggcaaaaggtgacagcatcagacaaatattgctatgagaaactgaatattgaagggacggagaagggtaactgtgggaaagacaaagacacatggatacagtgcaacaaacgggatgtgctttgtggttaccttttgtgtaccaatattggcaatatcccaaggcttggagaactcgatggtgaaatcacatctactttagttgtgcagcaaggaagaacattaaactgcagtggtgggcatgttaagcttgaagaagatgtagatcttggctatgtggaagatgggacaccttgtggtccccaaatgatgtgcttagaacacaggtgtcttcctgtggcttctttcaactttagtacttgcttgagcagtaaagaaggcactatttgctcaggaaatggagtttgcagtaatgagctgaagtgtgtgtgtaacagacactggataggttctgattgcaacacttacttccctcacaatgatgatgcaaagactggtatcactctgtctggcaatggtgttgctggcaccaatatcataataggcataattgctggcaccattttagtgctggccctcatattaggaataactgcgtggggttataaaaactatcgagaacagaggtcaaatgggctctctcattcttggagtgaaaggattccagacacaaaacatatttcagacatctgtgaaaatgggcgacctcgaagtaactcttggcaaggtaacctgggaggcaacaaaaagaaaatcagaggcaaaagatttagacctcggtctaattcaactgagtaagtctgaacctctaatggaaaaaggcactccaaggtcctgtgcaaatagtgtcaaaagtaaattaagcagatagtcaaagaactgt

SEQ ID NO: 2 - DNA, 1760 bp, Homo sapiens
acccagcgtgcgcggggcccgcgggccgggccggggtgacctgggctgcagccatggaagaacagagggaggccctgaggaagatcatcaaaacactggctgtgaagaatgaagaaattcagagctttatctactccctgaaacagatgctgctgaacgtggaggcgaactcggcgaaggtgcaggaggacctcgaagcagagttccagtccctcttctccctcctggaggagctgaaagaaggcatgcttatgaagataaaacaggaccgtgccagccgcacctacgagctgcagaaccagctggctgcctgcacgcgggccctggagagctccgaggagcttctggagacagccaaccagactctgcaggccatggacagcgaggactttcctcaggctgccaagcaaatcaaagatggagtgaccatggcccctgccttccggctatcattgaaagcgaaggtcagtgacaacatgagtcacctcatggtggacttcgcgcaagagcggcagatgctacaggcactcaagttcctgcctgtgcccagcgcacccgtgatcgacctggctgagtccctggtggcagataactgtgtgaccctggtgtggcgcatgccggatgaggacagcaagattgaccactacgtgctggagtaccggcggaccaacttcgagggcccgccccgcctcaaggaggaccagccctggatggtcatcgagggcatccggcagacagagtacaccctgacaggtctcaagtttgacatgaaatacatgaacttccgtgtgaaggcctgtaacaaggcagttgcaggagagttctctgagccggtgactctggagacaccagcgttcatgttccgcctggatgcgtccacatcccaccagaacctgcgggtggatgatctctccgtggagtgggacgctatgggcgggaaggtgcaggatatcaaggctcgcgagaaagatggcaaggggcggacggcgtctcccatcaactccccagccagaggtactccatctcccaagaggatgccctcaggtcgtgggggacgggaccgcttcaccgctgagtcctacacagttctgggggacacgctgatcgacggcggggagcattactgggaggtgcgctacgagccggacagcaaggcgttcggcgtgggcgtggcctaccgcagcctgggccgcttcgagcaactgggcaagacggccgcctcctggtgcctgcacgtcaacaattggctgcaggtcagcttcacggccaagcacgccaacaaggtcaaggtgctggacgcccccgtgcccgactgcctgggtgtgcactgtgacttccaccaaggcctcctgtccttctacaatgcccgcaccaaacaagtgctgcacactttcaagaccaggttcacacagccgctgctgcctgctttcacggtatggtgtggcagcttccaggtgacgacaggcctgcaggtccccagtgctgtgcgctgcctgcaaaagcgaggcagtgctaccagcagctccaacaccagcctcacctaggcccccaggcacccacccagctggggtgtttttgggggagtcgccgccaagcccaggctgctggagccaggcaccctcctctgtcacttgctgcttggagccttaactccagatgggggggtcaccaagagggagtgggcaccctggcgggccctctccccacctcacctcttaataaaggtcagacactggccaggcaaaaaaaaaaaaaaaaaa

SEQ ID NO: 3 - DNA, 4436 bp, Homo sapiens
aggcgaaggcttggacccccagctgaggagtcctgctcaagacacggtcactggatctgagaaacttcccaggggaccgcattccagagtcagtgactctgtgaagcacccacatctacctcttgccacgttcccacgggcttgggggaaagatggtggggaccaaggcctgggtgttctccttcctggtcctggaagtcacatctgtgttggggagacagacgatgctcacccagtcagtaagaagagtccagcctgggaagaagaaccccagcatctttgccaagcctgccgacaccctggagagccctggtgagtggacaacatggttcaacatcgactacccaggcgggaagggcgactatgagcggctggacgccattcgcttctactatggggaccgtgtatgtgcccgtcccctgcggctagaggctcggaccactgactggacacctgcgggcagcactggccaggtggtccatggtagtccccgtgagggtttctggtgcctcaacagggagcagcggcctggccagaactgctctaattacaccgtacgcttcctctgcccaccaggatccctgcgccgagacacagagcgcatctggagcccatggtctccctggagcaagtgctcagctgcctgtggtcagactggggtccagactcgcacacgcatttgcttggcagagatggtgtcgctgtgcagtgaggccagcgaagagggtcagcactgcatgggccaggactgtacagcctgtgacctgacctgcccaatgggccaggtgaatgctgactgtgatgcctgcatgtgccaggacttcatgcttcatggggctgtctcccttcccggaggtgccccagcctcaggggctgctatctacctcctgaccaagacgccgaagctgctgacccagacagacagtgatgggagattccgaatccctggcttgtgccctgatggcaaaagcatcctgaagatcacaaaggtcaagtttgcccccattgtactcacaatgcccaagactagcctgaaggcagccaccatcaaggcagagtttgtgagggcagagactccatacatggtgatgaaccctgagacaaaagcacggagagctgggcagagcgtgtctctgtgctgtaaggccacagggaagcccaggccagacaagtatttttggtatcataatgacacattgctggatccttccctctacaagcatgagagcaagctggtgctgaggaaactgcagcagcaccaggctggggagtacttttgcaaggcccagagtgatgctggggctgtgaagtccaaggttgcccagctgattgtcatagcatctgatgagactccttgcaacccagttcctgagagctatcttatccggctgccccatgattgctttcagaatgccaccaactccttctactatgacgtgggacgctgccctgttaagacttgtgcagggcagcaggataatgggatcaggtgccgtgatgctgtgcagaactgctgtggcatctccaagacagaggaaagggagatccagtgcagtggctacacgctacccaccaaggtggccaaggagtgcagctgccagcggtgtacggaaactcggagcatcgtgcggggccgtgtcagtgctgctgacaatggggagcccatgcgctttggccatgtgtacatggggaacagccgtgtaagcatgactggctacaagggcactttcaccctccatgtcccccaggacactgagaggctggtgctcacatttgtggacaggctgcagaagtttgtcaacaccaccaaagtgctacctttcaacaagaaggggagtgccgtgttccatgaaatcaagatgcttcgtcggaaagagcccatcactttggaagccatggagaccaacatcatccccctgggggaagtggttggtgaagaccccatggctgaactggagattccatccaggagtttctacaggcagaatggggagccctacataggaaaagtgaaggccagtgtgaccttcctggatccccggaatatttccacagccacagctgcccagactgacctgaacttcatcaatgacgaaggagacactttcccccttcggacgtatggcatgttctctgtggacttcagagatgaggtcacctcagagccacttaatgctggcaaagtgaaggtccaccttgactcgacccaggtcaagatgccagagcacatatccacagtgaaactctggtcactcaatccagacacagggctgtgggaggaggaaggtgatttcaaatttgaaaatcaaaggaggaacaaaagagaagacagaaccttcctggtgggcaacctggagattcgtgagaggaggctctttaacctggatgttcctgaaagcaggcggtgctttgttaaggtgagggcctaccggagtgagaggttcttgcctagtgagcagatccagggggttgtgatctccgtgattaacctggagcctagaactggcttcttgtccaaccctagggcctggggccgctttgacagtgtcatcacaggccccaacggggcctgtgtgcctgccttctgtgatgaccagtcccctgatgcctactctgcctatgtcttggcaagcctggctggggaggaactgcaagcagtggagtcttctcctaaattcaacccaaatgcaattggcgtccctcagccctatctcaacaagctcaactaccgtcggacggaccatgaggatccacgggttaaaaagacagctttccagattagcatggccaagccaaggcccaactcagctgaggagagcaatgggcccatctatgcctttgagaacctccgggcatgtgaagaggcaccacccagtgcagcccacttccggttctaccagattgagggggatcgatatgactacaacacagtccccttcaacgaagatgaccctatgagctggactgaagactatctggcatggtggccaaagccgatggaattcagggcctgctatatcaaggtgaagattgtggggccactggaagtgaatgtgcgatcccgcaacatggggggcactcatcggcggacagtggggaagctgtatggaatccgagatgtgaggagcactcgggacagggaccagcccaatgtctcagctgcctgtctggagttcaagtgcagtgggatgctctatgatcaggaccgtgtggaccgcaccctggtgaaggtcatcccccagggcagctgccgtcgagccagtgtgaaccccatgctgcatgagtacctggtcaaccacttgccacttgcagtcaacaacgacaccagtgagtacaccatgctggcacccttggacccactgggccacaactatggcatctacactgtcactgaccaggaccctcgcacggccaaggagatcgcgctcggccggtgctttgatggcacatccgatggctcctccagaatcatgaagagcaatgtgggagtagccctcaccttcaactgtgtagagaggcaagtaggccgccagagtgccttccagtacctccaaagcaccccagcccagtcccctgctgcaggcactgtccaaggaagagtgccctcgaggaggcagcagcgagcgagcaggggtggccagcgccagggtggagtggtggcctctctgagatttcctagagttgctcaacagcccctgatcaactaagttttgtggtacttcaccctcttctgccctcatttcatgtgacagccattgtgagactgatgcacaaactgtcacttggttaatttaagcacttctgttttcgtgaatttgcttgtttgtttcttcatgcctttacttactttgtcccatgctactgattggcacgtggcccccacaatggcacaataaagcccctttgtgaaactgttctttaaatgaaacacaagaaattggccactggtaaaactctgcagcttcaactgtacttcatttaatgccattaatgcaaatatacttcctcttctttttgcatggttttgcccacctctgcaatagtgataatctgatgctgaagatcaaataaccaatataaagcatatttcttggccttgctccacaggacataggcaagccttgatcatagttcatacatataaatggtggtgaaataaagaaataaaacacaatacttttacttgaatgtaaataacttatttatttctttgctaaatttggaattctagtgcacattcaaagttaagctattaaatatagggtgatcatagttcctctaccaagtctggaaagaacatctcctggtatccacaattacaccaggttgctaactgtatttgtacatttccctttgcattcgcttttgttcttgctagaaacccagtgtagcccagggcagatgtcaataaatgcatactctgtatttcgaaaaaa

SEQ ID NO: 4 - DNA, 3778 bp, Homo sapiens
gagatggcggagcagccgcgacgcggcccgtggccccgaaagcagggaagccgggcagccccgggacgcggcggagcccggggacagcggggacgccgcccagtcctccgggtatgaagctaaaatgcagcggctaagaacgcggctctggagcttgacaggcctgacgtcgaatcccagccctcccaccaactgagctgtgtgatcctgggcaaggtagaggggaagagattgaactttgctgacctttgatgtgaggcgctcagccagggccaaggggagagcctggcaagatttgcagcctgaagccatgggccagggggccatggtgacctgagacaagtggactctgtatagttgccccctgcttccccttctacctcccctaccctatgctaaggggactcgtctccacctcgtaaaggaaactccccaagggaatccctgtcccctattttcctatccttctacccttccaagacagtcctagcctatagaactcctacctcccatcccctgaggtggtccccattcctccctcccttcctccccccgccatgctccagttgtggaaggtggtacgcccagctcggcagctggaactgcaccgcctcatactgctgctgatcgctttcagcctgggctccatgggcttcctggcttattatgtgtccaccagccctaaggccaaggaacccttgcccctgcccttgggagactgcagcagcggtggggcagctggtcctggccctgcacggcctccagttccacctcggccccccaggcctccagagacagctcgaactgaacccgtggtccttgtgtttgtggagagtgcatactcacagctggggcaggaaattgtggccatcctggagtctagtcgttttcgttatagcactgagttggcacctggccgaggggacatgcccacattgactgataatacccatggccgctatgtcttggtcatttatgagaacctgctcaagtatgtcaacctggatgcctggagtcgggaactgctagaccggtactgcgtggagtatggtgtgggcatcattggctttttccgagcccacgagcacagcctactgagcgcccagctcaagggctttcccctttttttacactcaaacttggggctccgggactaccaagtgaatccttctgccccgctactgcatctcacacgccccagccgcctagaaccagggccactgcctggtgatgactggaccatcttccaatccaatcatagtacatatgaaccagtgcttcttgccagccttcggccagctgagcccgcagtgccaggaccagttcttcgtcgggcccggcttcccactgtggtacaggacctggggcttcatgatggcatccagcgggtgctctttggacatggcctttccttctggctccacaaacttatcttcgttgatgctgttgcatacctcactggcaagcgcctctgcctggaccttgaccgctacatcttggtagacatcgatgacatctttgtgggcaaggaagggacccgcatgaaggtggctgatgttgaggctctgttgaccacccagaacaaactcaggaccttagttcccaacttcaccttcaacttgggcttctcgggcaagttctatcatactgggacagaggaggaggatgcaggggacgacatgctgctgaagcaccgcaaagagttctggtggttcccccacatgtggagccacatgcagccacacctgttccacaatcgctccgtgctggctgaccagatgaggctcaacaaacagtttgctctggagcatgggattcccacggacctggggtatgctgtggccccccaccactcgggtgtgtaccccatccacacgcagctctatgaggcctggaaatccgtgtggggcatccaggtgaccagcactgaggagtatccccatctccgccctgcccgctaccgccgtggcttcattcacaatggcattatggtgctgccccggcagacatgtggcctcttcactcacacaatcttctataatgagtatcctggaggctctcgtgaactagaccggagcatccgaggtggagagctctttctgacagtgctgcttaatccgatcagcatctttatgacccatctgtccaattatggaaatgaccggctgggcctatacacctttgagagcttggtgcgcttcctccagtgttggacacggctgcgcctacagacccttcctcctgtcccacttgcacagaagtactttgaacttttccctcaggagcgaagccccctttggcagaatccctgtgatgacaagaggcacaaagatatctggtccaaggagaaaacctgtgatcgtctcccgaagttcctcattgtgggaccccagaaaacagggactacagctattcacttcttcctgagcctgcacccagctgtaactagcagcttccctagccccagcacatttgaggagattcagttcttcaacagccctaattaccacaagggtattgactggtacatggatttcttccctgttccttccaatgccagcactgatttcctatttgaaaaaagtgccacctactttgactctgaagttgtaccacggcggggggctgccctcctgccacgagccaagatcatcacagtgctcaccaaccctgctgacagggcctactcctggtaccagcatcagcgagcccatggagacccagttgctctgaactataccttctatcaggtgatttcagcctcctcccagacccctctggcactacgctccctgcagaaccgctgtcttgtccctggctactattctacccatctacaacgctggctgacttactacccctctggacagttgctgattgtggatgggcaagagctgcgtaccaacccagcagcctcaatggagagcatccagaagttcctgggtatcacaccctttctgaactacacacggaccctcaggtttgatgatgataagggattttggtgccagggacttgaaggtggtaagactcgctgtctaggccggagcaaaggccggaggtatccagatatggacactgagtcccgtcttttccttacggattttttccggaaccataatttggagttgtcgaagctgctgagccggcttggacagccagtgccctcgtggcttcgggaagaactgcagcattccagtctgggctgatgtcccagcctcccataccagcaaaatgccccctgcttccctaaggggcaggtccagagcagggcccacaagggggattagagtggcctggcccctccccctctacctcagtagcccccaggcctgagatggctgagaagggaagggtatccttttcccacagttctgggacaaataaaggggcttcctttggtaccccacataatagtgctaggtacctttgacccatcatcttgggaggtggggaggaatgagagggtccaggcagggtgtaggggaatgtattagtccaatgagatttccctcttcatccgcagcagtgtatctattctatacctggctatgggagagaccccttgcatgggagggaccccttgctatggcccctttagccaggcagtgggatctacctgtggcccggcctccctaatgtcattcacattgaatggggatgaggtcggacagtggctcatagagccgagtatgagccctagctgtgggctagaaatgtccttaataaacatccttatttttctgtttaaaaaaaaaaaaaaaaaaaaaaaaaaaaa

SEQ ID NO: 5 - DNA, 2530 bp, Homo sapiens
cagcttccctgtggtttcccgaggcttccttgcttcccgctctgcgaggagcctttcatccgaaggcgggacgatgccggataatcggcagccgaggaaccggcagccgaggatccgctccgggaacgagcctcgttccgcgcccgccatggaaccggatggtcgcggtgcctgggcccacagtcgcgccgcgctcgaccgcctggagaagctgctgcgctgctcgcgttgtactaacattctgagagagcctgtgtgtttaggaggatgtgagcacatcttctgtagtaattgtgtaagtgactgcattggaactggatgtccagtgtgttacaccccggcctggatacaagacttgaagataaatagacaactggacagcatgattcaactttgtagtaagcttcgaaatttgctacatgacaatgagctgtcagatttgaaagaagataaacctaggaaaagtttgtttaatgatgcaggaaacaagaagaattcaattaaaatgtggtttagccctcgaagtaagaaagtcagatatgttgtgagtaaagcttcagtgcaaacccagcctgcaataaaaaaagatgcaagtgctcagcaagactcatatgaatttgtttccccaagtcctcctgcagatgtttctgagagggctaaaaaggcttctgcaagatctggaaaaaagcaaaaaaagaaaactttagctgaaatcaaccaaaaatggaatttagaggcagaaaaagaagatggtgaatttgactccaaagaggaatctaagcaaaagctggtatccttctgtagccaaccatctgttatctccagtcctcagataaatggtgaaatagacttactagcaagtggctccttgacagaatctgaatgttttggaagtttaactgaagtctctttaccattggctgagcaaatagagtctccagacactaagagcaggaatgaagtagtgactcctgagaaggtctgcaaaaattatcttacatctaagaaatctttgccattagaaaataatggaaaacgtggccatcacaatagactttccagtcccatttctaagagatgtagaaccagcattctgagcaccagtggagattttgttaagcaaaccgtgccctcagaaaatataccattgcctgaatgttcttcaccaccttcatgcaaacgtaaagttggtggtacatcagggaggaaaaacagtaacatgtccgatgaattcattagtctttcaccaggtacaccaccttctacattaagtagttcaagttacaggcaagtgatgtctagtccctcagcaatgaagctgttgcccaatatggctgtgaaaagaaatcatagaggagagactttgctccatattgcttctattaagggcgacataccttctgttgaataccttttacaaaatggaagtgatccaaatgttaaagaccatgctggatggacaccattgcatgaagcttgcaatcatgggcacctgaaggtagtggaattattgctccagcataaggcattggtgaacaccaccgggtatcaaaatgactcaccacttcacgatgcagccaagaatgggcacgtggatatagtcaagctgttactttcctatggagcctccagaaatgctgttaatatatttggtctgcggcctgtcgattatacagatgatgaaagtatgaaatcgctattgctgctaccagagaagaatgaatcatcctcagctagccactgctcagtaatgaacactgggcagcgtagggatggacctcttgtacttataggcagtgggctgtcttcagaacaacagaaaatgctcagtgagcttgcagtaattcttaaggctaaaaaatatactgagtttgacagtacagtaactcatgttgttgttcctggtgatgcagttcaaagtaccttgaagtgtatgcttgggattctcaatggatgctggattctaaaatttgaatgggtaaaagcatgtctacgaagaaaagtatgtgaacaggaagaaaagtatgaaattcctgaaggtccacgcagaagcaggctcaacagagaacagctgttgccaaagctgtttgatggatgctacttctatttgtggggaaccttcaaacaccatccaaaggacaaccttattaagctcgtcactgcaggtgggggccagatcctcagtagaaagcccaagccagacagtgacgtgactcagaccatcaatacagtcgcataccatgcgagacccgattctgatcagcgcttctgcacacagtatatcatctatgaagatttgtgtaattatcacccagagagggttcggcagggcaaagtctggaaggctccttcgagctggtttatagactgtgtgatgtcctttgagttgcttcctcttgacagctgaatattataccagatgaacatttcaaattgaatttgcacggtttgtgagagcccagtcattgtactgtttttaatgttcacatttttacaaataggtagagtcattcatatttgtctttgaatc

SEQ ID NO: 6 - DNA, 3658 bp, Homo sapiens
tgaggactcttagaagtgctcttatcagtagcatcttaattactttacaatggattttaaatggaaaggaagtttacaataatagcaaatgcatattgacagctctttagtgcccggtgctgttctaagtccttatgactaccctgtgaaataagttccaccatgaccccaattttcctgaaaaggagactgaggcatggagagctttagtattttgcccaatgtcacacagctagtaaatggggacccccatgtgaaactactcactgattgtcctactctcttgtggttttatctttttagcagacaccaaatgaggaatgtttgttcctggaaaggctggaggagaaccattacaacacctatatatccaagaagcatgcagagaagaattggtttgttggcctcaagaagaatgggagctgcaaacgcggtcctcggactcactatggccagaaagcaatcttgtttctccccctgccagtctcttctgattaaagagatctgttctgggtgttgaccactccagagaagtttcgaggggtcctcacctggttgacccaaaaatgttcccttgaccattggctgcgctaacccccagcccacagagcctgaatttgtaagcaacttgcttctaaatgcccagttcacttctttgcagagccttttacccctgcacagtttagaacagagggaccaaattgcttctaggagtcaactggctggccagtctgggtctgggtttggatctccaattgcctcttgcaggctgagtccctcaatgcaaaagtggggctaaatgaagtgtgttaaggggtcagctaagtgggacattagtaactgcacactatttccctctactgagtaaaccctatctgtgattcccccaaacatctggcatggctcccttttgtccttcctgtgccctgcaaatattagcaaagaagcttcatgccaggttaggaaggcagcattccatgaccagaaacagggacaaagaaatccccccttcagaacagaggcatttaaaatggaaaagagagattggattttggtgggtaacttagaaggatggcatctccatgtagaataaatgaagaaagggaggcccagccgcaggaaggcagaataaatccttgggagtcattaccacgccttgaccttcccaaggttactcagcagcagagagccctgggtgacttcaggtggagagcactagaagtggtttcctgataacaagcaaggatatcagagctgggaaattcatgtgcatctggggactgagtgtgggagtgcagagaaagaaagggaaactggctgaggggataccataaaaagaggatgatttcagaaggagaaggaaaaagaaagtaatgccacacattgtgcttggcccctggtaagcagaggctttggggtcctagcccagtgcttctccaacactgaagtgcttgcagatcatctggggacctggtttgaatggagattctgattcagtgggttgggggcagagtttctgcagttccatcaggtcccccccaggtgcaggtgctgacaatactgctgccttacccgccatacattaaggagcagggtcctggtcctaaagagttattcaaatgaaggtggttcgacgccccgaacctcacctgacctcaactaacccttaaaaatgcacacctcatgagtctacctgagcattcaggcagcactgacaatagttatgcctgtactaaggagcatgattttaagatgctttggcccaatgcctataaaatgcccatttcgaagatatacaaaaacatacttcaaaaatgttaaacccttaccaacagcttttcccaggagaccgtttgtattaccattacttgtataaatacacttcctgcttaaacttgacccaggtggctagcaaattagaaacaccattcatctctaacatatgatactgatgccatgtaaaggcctttaataagtcattgaaatttactgtgagactgtatcttttaattgcatttaaaaatatatagcttgaaagcagttaaactgattagtattcaggcactgagaatgatagtaataggatacaatgtataagctactcacttatctgatacttatttacctataaaatgagatttttgttttccactgtgctattacaaattttcttttgaaagtaggaactcttaagcaatggtaattgtgaataaaaattgatgagagtgttagctcctgtttcatatgaaattgaagtaattgttaactaaaaacaattccttagtaactgaactgtcatatttagaatggaaggaaaatgacagtttgtgaaagttcaaagcaatagtgcaattgaagaattgacctaagtaagctgacattatggttaataatagtattttagatttgtgcagcaaaataatttcataacttttttgtttttgttacttggataagatcaatctgttttattttagtaaatctttgcaggcaagttagagaaaatgcagtgtggcttaacgtctctttagtatgaagatttggccagaaaaagatacccagagaggaaatctaagataattataatggtccatactttttattgtatgaatcaaactcaagcataacattggccaaggaaaattaaataccattgctaacttgtgaaatggaagtctgtgatttcggagatgcaaagcattgtagtaaaaacaccaatgtgacctcgaccatctcagcccagatatcattcatatatctgttcaatgactattaaggtgcctactgtgtgctaggcactgtactggatactggggaccttgtctgtctggtttgctgctgtatcttctcccagggcattatatttatgatgaaagatgctgtggattcaattctttcagtcaagaataaacacagactttgtaggttcctgctgaataaagcaaatcccagaaacccagattttggaagaatcagcaacccccagcataaaataaacccctatcaaaatgtcagaggacatggcaaggtaaacttagcattttcaactttagaaccgggtcagcttcagggggactgctttcaaatcagccaaagagcctgtcagatcttcttagaaggaagaggttggtagttccctgctctgttttgaacatgctctagtttattaacctggggacattcccattgctgtcttaagtaagtctcatagccagctcctgtcacgtgactctcatatggattcattttcgggccagctctgaacaaagcatcatgaacatatgtgcttttggtcgtttgcaatgtgatggtggtggaggtaggtattggtttccttggaaggcatgataagaaagattcacaatggccaacagtgtgtatgaacaaaaaactgattggagcatcagctagtactgaaggtccttgctttgtgtcagaggcaaaggaacccaaggcgccaagtcctcagccttgagtgtactgctgacaactaaactcacaggctgcaaagcagacctctgatgaagatgcctgttatttcacatcactgtctttttgtgtatcatagtctgcaccttacaaatattaataaatgttccaataataggtgataatgtctctgagtttctgagcatcctgctgcctcatctttctatca

SEQ ID NO: 7 - DNA, 1744 bp, Homo sapiens
atgcacgcccactgcctgcccttccttctgcacgcctggtgggccctactccaggcgggtgctgcgacggtggccactgcgctcctgcgtacgcgggggcagccctcgtcgccatcccctctggcgtacatgctgagcctctaccgcgacccgctgccgagggcagacatcatccgcagcctacaggcagaagatgtggcagtggatgggcagaactggacgtttgcttttgacttctccttcctgagccaacaagaggatctggcatgggctgagctccggctgcagctgtccagccctgtggacctccccactgagggctcacttgccattgagattttccaccagccaaagcccgacacagagcaggcttcagacagctgcttagagcggtttcagatggacctattcactgtcactttgtcccaggtcaccttttccttgggcagcatggttttggaggtgaccaggcctctctccaagtggctgaagcgccctggggccctggagaagcagatgtccagggtagctggagagtgctggccgcggccccccacaccgcctgccaccaatgtgctccttatgctctactccaacctctcgcaggagcagaggcagctgggtgggtccaccttgctgtgggaagccgagagctcctggcgggcccaggagggacagctgtcctgggagtggggcaagaggcaccgtcgacatcacttgccagacagaagtcaactgtgtcggaaggtcaagttccaggtggacttcaacctgatcggatggggctcctggatcatctaccccaagcagtacaacgcctatcgctgtgagggcgagtgtcctaatcctgttggggaggagtttcatccgaccaaccatgcatacatccagagtctgctgaaacgttaccagccccaccgagtcccttccacttgttgtgccccagtgaagaccaagccgctgagcatgctgtatgtggataatggcagagtgctcctagatcaccataaagacatgatcgtggaagaatgtgggtgcctctgatgacatcctggagggagactggatttgcctgcactctggaaggctgggaaactcctggaagacatgataaccatctaatccagtaaggagaaacagagaggggcaaagttgctctgcccaccagaactgaagaggaggggctgcccactctgtaaatgaagggctcagtggagtctggccaagcacagaggctgctgtcaggaagagggaggaagaagcctgtgcagggggctggctggatgttctctttactgaaaagacagtggcaaggaaaagcacaagtgcatgagttctttactggattttttaaaaacctgtgaaccccccgaaactgtatgtgaaagttgagacatatgtgcatgtattttggaggtgggatgaagtcacctatagctttcatgtattctccaaagtagtctgtgtgtgacctgtccccctccccaaagattaaggatcactgtatagattaaaaagagtccgtcaatctcattgcctcaggctgggttgggggagccccacagctttctggctggccagtggcaatctactggccttgtccagaggctcactggagtggttctctgctaatgagctgtacaacaataaagccattgtctagttaaaaaaaaaaaaaaaaaaaaaaaaaaaaaaaaaaaaaaaaaaaaaaaaaaaaaaaaaaaaaaaaaaaaaaaaaaaaaaa

SEQ ID NO: 8 - DNA, 2119 bp, Homo sapiens
gagttgcttttgcgcgcgaactgtaagtgccagggtctcagggtcaggtcgcggctggtcactgtgcaggcgcttgggtgacgcgacgatctcagcggatctggtcaccttcgtctccccgccatggagacctcagcactcaagcagcaggagcagcccgcggcgaccaagatcaggaacctgccctgggttgaaaaataccggccacagaccctgaatgatctcatttctcatcaggacattctgagtaccattcagaagtttatcaatgaagaccgactgccacacttgcttctctacggtcccccagggacaggcaagacatctaccatcctagcctgtgcgaaacagctatataaagacaaagaatttggctccatggtcttggagctgaatgcttcagatgaccgaggaatagacatcattcgaggaccgatcctgagctttgctagcacaaggacaatatttaagaaaggctttaagctagtgatcttggatgaagcagacgccatgactcaggacgcccagaatgccttgagaagagtaattgagaaattcacagaaaataccagattctgcctcatctgtaactatctgtcaaagatcatccctgccttgcagtcccgctgcacgaggtttcggttcggtcccctgactcctgaactcatggttccccgcctggaacatgtcgtggaagaagagaaagttgatataagtgaagatggaatgaaagcactagtcactctttccagtggagacatgcgtagggctctgaacattttgcagagcaccaatatggcctttgggaaggtgacagaggagactgtctacacctgcaccgggcacccgctcaagtcagacattgccaacatcctggactggatgttgaatcaagatttcaccacagcctacagaaatattacagagttgaaaactctgaaggggttggcactgcatgatatcctgacagagatacacttgtttgtgcatagagttgactttccatcttcagttcgaatacatttattgaccaaaatggcagacattgagtacaggctttctgttggcaccaacgagaagatccagctgagctccctcattgctgcatttcaagtcaccagagacctgattgttgcagaggcctagatgctctgagggccattcacaattctcagggctcagcagtgatgggagaacagaggacagttccaggataaactgctgcctggggctgtgggatgaatcagtcaccccgaatcttggaaaaacccccttccaggagaggatgggcaggcatttaaaaagtaccatttttgtggttgtttggagcagggatgtacaaaataattttaatgtattaactcatactgcctgtcttttataggggaaaaaaataaccttttttattttaaagttataaggtttttaccttttagttgcttggatgacagggaattagcctaccccattttggtctggaacagaagactttcaaatttaatatggtccaagtgtcttcctactcaaggtaaacattatctccaaaattacatttatgattctaatatttggcattgtgtctgtatctaatttaaacagatgttaatggacgtctggccgaaactattatacttttataagatgagctgaatcctcttactttaaaaactggtctttttatttaccctctgtggtagaagagtcaccagcaggttccaaattgatgtgtatgataggaaaaaaaccttaattttaaatataatatagagccttaaactatgccactgggtggcagaggctgtataaaacgcacttgttttcatgcaggagcggggcaagtaaggttgagcctgactgtaaacctagaactgcggaaggactgggacttttgtacaaatttcacatttattttacagcaatcatgctgcatttgtgttagtgttctttataataaaaaacaaagcagcctcctggctggctgtgttacaagtgactcttccttagacagctagaaagatgctgactttgtcaaacttgcatttatatgaaaaccttctgtctctaatatcacagaataaactttctttagatgctgttctttaaaaaaaaaaaaaaaaaa

SEQ ID NO: 9 - DNA, 1305 bp, Homo sapiens
agaatgttcttttggccactgtgaagcctcaggaaggggctcggattgctcaaggacccatgggagagaggaggctttgactgggctgcctgcctgtgaggtctctggactagaggtccaacgcagtccagctgacaaggatggaatacgccatgaagtcccttagccttctctaccccaagtccctctccaggcatgtgtcagtgcgtacctctgtggtgacccagcagctgctgtcggagcccagccccaaggcccccagggcccggccctgccgcgtaagcacggcggatcgaagcgtgaggaagggcatcatggcttacagtcttgaggacctcctcctcaaggtccgggacactctgatgctggcagacaagcccttcttcctggtgctggaggaagatggcacaactgtagagacagaagagtacttccaagccctggcaggggatacagtgttcatggtcctccagaaggggcagaaatggcagcccccatcagaacaggggacaaggcacccactgtccctctcccataagcctgccaagaagattgatgtggcccgtgtaacgtttgatctgtacaagctgaacccacaggacttcattggctgcctgaacgtgaaggcgactttttatgatacatactccctttcctatgatctgcactgctgtggggccaagcgcatcatgaaggaagctttccgctgggccctcttcagcatgcaggccacaggccacgtactgcttggcacctcctgttacctgcagcagctcctcgatgctacggaggaagggcagccccccaagggcaaggcctcatcccttatcccgacctgtctgaagatactgcagtgaaagcccaagtccttggaagctttccccagtgaaggactgactgggggcctcacgcttaactggtagtgcccacaagcctggcagctgtagagccgcgaacctccccacacctccctcaccgcgcaggaccctgagtgaggaggaggagctggaaacctggggtgggttggccaaaggagaacctcaagctcctggcctgatccagctccttcctgcccaaggcagcttagcccatccagactggtcctgaagtctgtccctccattggcatgaagtctgccccttagcaatccggcctcgcaggctgtactttcatggtgctctctaccttctggcccccatcccggaacattcctgagtgaattcgcaagcgcactagcatgtgatattagggagtttgcaataaattattgaggctgaaaaaaaaaaaaaaaaaaaaaaaaaaaaa

SEQ ID NO: 10 - DNA, 1826 bp, Homo sapiens
agtatgtgtggttggggaattcatgtggaggtcagagtggaagcaggtgtgagagggtccagcagaaggaaacatggctgccaaagtgtttgagtccattggcaagtttggcctggccttagctgttgcaggaggcgtggtgaactctgccttatataatgtggatgctgggcacagagctgtcatctttgaccgattccgtggagtgcaggacattgtggtaggggaagggactcattttctcatcccgtgggtacagaaaccaattatctttgactgccgttctcgaccacgtaatgtgccagtcatcactggtagcaaagatttacagaatgtcaacatcacactgcgcatcctcttccggcctgtcgccagccagcttcctcgcatcttcaccagcatcggagaggactatgatgagcgtgtgctgccgtccatcacaactgagatcctcaagtcagtggtggctcgctttgatgctggagaactaatcacccagagagagctggtctccaggcaggtgagcgacgaccttacagagcgagccgccacctttgggctcatcctggatgacgtgtccttgacacatctgaccttcgggaaggagttcacagaagcggtggaagccaaacaggtggctcagcaggaagcagagagggccagatttgtggtggaaaaggctgagcaacagaaaaaggcggccatcatctctgctgagggcgactccaaggcagctgagctgattgccaactcactggccactgcaggggatggcctgatcgagctgcgcaagctggaagctgcagaggacatcgcgtaccagctctcacgctctcggaacatcacctacctgccagcggggcagtccgtgctcctccagctgccccagtgagggcccaccctgcctgcacctccgcgggctgactgggccacagccccgatgattcttaacacagccttccttctgctcccaccccagaaatcactgtgaaatttcatgattggcttaaagtgaaggaaataaaggtaaaatcacttcagatctctaattagtctatcaaatgaaactctttcattcttctcacatccatctacttttttatccacctccctaccaaaaattgccaagtgcctatgcaaaccagctttaggtcccaattcggggcctgctggagttccggcctgggcaccagcatttggcagcacgcaggcggggcagtatgtgatggactggggagcacaggtgtctgcctagatccacgtgtggcctccgtcctgtcactgatggaaggtttgcggatgagggcatgtgcggctgaactgagaaggcaggcctccgtcttcccagcggttcctgtgcagatgctgctgaagagaggtgccggggaggggcagagaggaagtggtctgtctgttaccataagtctgattctctttaactgtgtgaccagcggaaacaggtgtgtgtgaactgggcacagattgaagaatctgcccctgttgaggtgggtgggcctgactgttgccccccagggtcctaaaacttggatggacttgtatagtgagagaggaggcctggaccgagatgtgagtcctgttgaagacttcctctctaccccccaccttggtccctctcagatacccagtggaattccaacttgaaggattgcatcctgctggggctgaacatgcctgccaaagacgtgtccgacctacgttcctggccccctcgttcagagactgcccttctcacgggctctatgcctgcactgggaaggaaacaaatgtgtataaactgctgtcaataaatgacacccagaccttcc

SEQ ID NO: 11 - DNA, 7508 bp, Homo sapiens
tccatgggttccaagagaagaagagctacctccccttccagcagtgtcagcggggactttgatgatgggcaccattctgtgtcaacaccaggcccaagcaggaaaaggaggagactttccaatcttccaactgtagatcctattgccgtgtgccatgaactctataataccatccgagactataaggatgaacagggcagacttctctgtgagctcttcattagggcaccaaagcgaagaaatcaaccagactattatgaagtggtttctcagcccattgacttgatgaaaatccaacagaaactaaaaatggaagagtatgatgatgttaatttgctgactgctgacttccagcttctttttaacaatgcaaagtcctattataagccagattctcctgaatataaagccgcttgcaaactctgggatttgtaccttcgaacaagaaatgagtttgttcagaaaggagaagcagatgacgaagatgatgatgaagatgggcaagacaatcagggcacagtgactgaaggatcttctccagcttacttgaaggagatcctggagcagcttcttgaagccatagttgtagctacaaatccatcaggacgtctcattagcgaactttttcagaaactgccttctaaagtgcaatatccagattattatgcaataattaaggagcctatagatctcaagaccattgcccagaggatacagaatggaagctacaaaagtattcatgcaatggccaaagatatagatctcctcgcaaaaaatgccaaaacttataatgagcctggctctcaagtattcaaggatgcaaattcaattaaaaaaatattttatatgaaaaaggctgaaattgaacatcatgaaatggctaagtcaagtcttcgaatgagtaataaaagagcagtacaaggaggtcgtttatcagcaattacaatggcacttcaatatggctcagaaagtgaagaagatgctgctttagctgctgcacgctatgaagagggagagtcagaagcagaaagcatcacttcctttatggatgtttcaaatcctttttatcagctttatgacacagttaggagttgtcggaataaccaagggcagctaatagctgaacctttttaccatttgccttcaaagaaaaaataccctgattattaccagcaaattaaaatgcccatatcactacaacagatccgaacaaaactgaagaatcaagaatatgaaactttagatcatttggagtgtgatctgaatttaatgtttgaaaatgccaaacgctataatgtgcccaattcagccatctacaagcgagttctaaaattgcagcaagttatgcaggcaaagaagaaagagcttgccaggagagacgatatcgaggacggagacagcatgatctcttcagccacctctgatactggtagtgccaaaagaaaaagtaaaaagaacataagaaagcagcgaatgaaaatcttattcaatgttgttcttgaagctcgagagccaggttcaggcagaagactttgtgacctatttatggttaaaccatccaaaaaggactatcctgattattataaaatcatcttggagccaatggacttgaaaataattgagcataacatccgcaatgacaaatatgctggtgaagagggaatgatagaagacatgaagctgatgttccggaatgccaggcactataatgaggagggctcccaggtttataatgatgcacatatcctggagaagttactcaaggagaaaaggaaagagctgggcccactgcctgatgatgatgacatggcttctcccaaactcaagctgagtaggaagagtggcatttctcctaaaaaatcaaaatacatgactccaatgcagcagaaactaaatgaggtctatgaagctgtaaagaactatactgataagaggggtcgccgcctcagtgccatatttctgaggcttccctctagatctgagttgcctgactactatctgactattaaaaagcccatggacatggaaaaaattcgaagtcacatgatggccaacaagtaccaagatattgactctatggttgaggactttgtcatgatgtttaataatgcctgtacatacaatgagccggagtctttgatctacaaagatgctcttgttctacacaaagtcctgcttgaaacacgcagagacctggagggagatgaggactctcatgtcccaaatgtgactttgctgattcaagagcttatccacaatctttttgtgtcagtcatgagtcatcaggatgatgagggaagatgctacagcgattctttagcagaaattcctgctgtggatcccaactttcctaacaaaccaccccttacatttgacataattaggaagaatgttgaaaataatcgctaccgtcggcttgatttatttcaagagcatatgtttgaagtattggaacgagcaagaaggatgaatcggacagattcagaaatatatgaagatgcagtagaacttcagcagttttttattaaaattcgtgatgaactctgcaaaaatggagagattcttctttcaccggcactcagctataccacaaaacatttgcataatgatgtggagaaagagagaaaggaaaaattgccaaaagaaatagaggaagataaactaaaacgagaagaagaaaaaagagaagctgaaaagagtgaagattcctctggtgctgcaggcctctcaggcttacatcgcacatacagccaggactgtagctttaaaaacagcatgtaccatgttggagattacgtctatgtggaacctgcagaggccaacctacaaccacatatcgtctgtattgaaagactgtgggaggattcagctggtgaaaaatggttgtatggctgttggttttaccgaccaaatgaaacattccacctggctacacgaaaatttctagaaaaagaagtttttaagagtgactattacaacaaagttccagttagtaaaattctaggcaagtgtgtggtcatgtttgtcaaggaatactttaagttatgcccagaaaacttccgagatgaggatgtttttgtctgtgaatcacggtattctgccaaaaccaaatcttttaagaaaattaaactgtggaccatgcccatcagctcagtcaggtttgtccctcgggatgtgcctctgcctgtggttcgcgtggcctctgtatttgcaaatgcagataaaggtgatgatgagaagaatacagacaactcagaggacagtcgagctgaagacaattttaacttggaaaaggaaaaagaagatgtccctgtggaaatgtccaatggtgaaccaggttgccactactttgagcagctccattacaatgacatgtggctgaaggttggcgactgtgtcttcatcaagtcccatggcctggtgcgtcctcgtgtgggcagaattgaaaaagtatgggttcgagatggagctgcatatttttatggccccatcttcattcacccagaagaaacagagcatgagcccacaaaaatgttctacaaaaaagaagtatttctgagtaatctggaagaaacctgccccatgacatgtattctcggaaagtgtgctgtgttgtcattcaaggacttcctctcctgcaggccaactgaaataccagaaaatgacattctgctttgtgagagccgctacaatgagagcgacaagcagatgaagaaattcaaaggattgaagaggttttcactctctgctaaagtggtagatgatgaaatttactacttcagaaaaccaattgttcctcagaaggagccatcacctttgctggaaaagaagatccagttgctagaagctaaatttgccgagttagaaggtggagatgatgatattgaagagatgggagaagaagatagtgaggtcattgaacctccttctctacctcagcttcagacccccctggccagtgagctggacctcatgccctacacacccccacagtctaccccaaagtctgccaaaggcagtgcaaagaaggaaggctccaaacggaaaatcaacatgagtggctacatcctgttcagcagtgagatgagggctgtgattaaggcccaacacccagactactctttcggggagctcagccgcctggtggggacagaatggagaaatcttgagacagccaagaaagcagaatatgaaggcatgatgggtggctatccgccaggccttccacctttgcagggcccagttgatggccttgttagcatgggcagcatgcagccacttcaccctggggggcctccaccccaccatcttccgccaggtgtgcctggcctcccgggcatcccaccaccgggtgtgatgaaccaaggagtggcccctatggtagggactccagcaccaggtggaagtccatatggacaacaggtgggagttttggggcctccagggcagcaggcaccacctccatatcccggcccacatccagctggaccccctgtcatacagcagccaacaacacccatgtttgtagctcccccaccaaagacccagcggcttcttcactcagaggcctacctgaaatacattgaaggactcagtgcggagtccaacagcattagcaagtgggatcagacactggcagctcgaagacgcgacgtccatttgtcgaaagaacaggagagccgcctaccctctcactggctgaaaagcaaaggggcccacaccaccatggcagatgccctctggcgccttcgagatttgatgctccgggacaccctcaacattcgccaagcatacaacctagaaaatgtttaatcacatcattacgtttcttttatatagaagcataaagagttgtggatcagtagccattttagttactgggggtggggggaaggaacaaaggaggataatttttattgcattttactgtacatcacaaggccatttttatatacggacacttttaataagctatttcaatttgtttgttatattaagttgactttatcaaatacacaaagatttttttgcatatgtttccttcgtttaaaaccagtttcataattggttgtatatgtagacttggagttttatctttttacttgttgccatggaactgaaaccattagaggtttttgtcttggcttggggtttttgttttcttggttttgggtttttttatatatatatataaaagaacaaaatgaaaaaaaacacacacacacaagagtttacagattagtttaaattgataatgaaatgtgaagtttgtcctagtttacatcttagagaggggagtatacttgtgtttgtttcatgtgcctgaatatcttaagccactttctgcaaaagctgtttcttacagatgaagtgctttctttgaaaggtggttatttaggttttagatgtttaatagacacagcacatttgctctattaactcagaggctcactacagaaatatgtaatcagtgctgtgcatctgtctgcagctaatgtacctcctggacaccaggaggggaaaaagcactttttcaattgtgctgagttagacatctgtgagttagactatggtgtcagtgatttttgcagaacacgtgcacaaccctgaggtatgtttaatctaggcaggtacgtttaaggatattttgatctatttataatgaattcacaatttatgcctataaatttcagatgatttaaaattttaaacctgttacattgaaaaacattgaagttcgtcttgaagaaagcattaaggtatgcatggaggtgatttatttttaaacataacacctaacctaacatgggtaagagagtatggaactagatatgagctgtataagaagcataattgtgaacaagtagattgattgccttcatatacaagtatgttttagtattccttatttccttattatcagatgtattttttcttttaagtttcaatgttgttataattctcaaccagaaatttaatactttctaaaatattttttaaatttagcttgtgcttttgaattacaggagaagggaatcataatttaataaaacgcttactagaaagaccattacagatcccaaacacttgggtttggtgaccctgtctttcttatatgaccctacaataaacatttgaaggcagcataggatggcagacagtaggaacattgtttcacttggcggcatgtttttgaaacctgctttatagtaactgggtgattgccattgtggtagagcttccactgctgtttataatctgagagagttaatctcagaggatgcttttttccttttaatctgctatgaatcagtacccagatgtttaattactgtacttattaaatcatgagggcaaaagagtgtagaatggaaaaaagtctcttgtatctagatactttaaatatgggaggccctttaacttaattgcctttagtcaaccactggatttgaatttgcatcaagtattttaaataatattgaatttaaaaaaatgtattgcagtagtgtgtcagtaccttattgttaaagtgagtcagataaatcttcaattcctggctatttgggcaattgaatcatcatggactgtataatgcaatcagattattttgtttctagacatccttgaattacaccaaagaacatgaaatttagttgtggttaaattatttatttatttcatgcattcattttatttcccttaaggtctggatgagacttctttggggagcctctaaaaaaatttttcactgggggccacgtgggtcattagaagccagagctctcctccaggctccttcccagtgcctagaggtgctataggaaacatagatccagccaggggcttccctaaagcagtgcagcaccggcccagggcatcactagacaggccctaattaagttttttttaaaaagcctgtgtatttattttagaatcatgtttttctgtatattaacttgggggatatcgttaatatttaggatataagatttgaggtcagccatcttcaaaaaagaaaaaaaaattgactcaagaaagtacaagtaaactatacacctttttttcataagttttaggaactgtagtaatgtggcttagaaagtataatggcctaaatgttttcaaaatgtaagttcctgtggagaagaattgtttatattgcaaacggggggactgaggggaacctgtaggtttaaaacagtatgtttgtcagccaactgatttaaaaggcctttaactgttttggttgttgttttttttttaagccactctccccttcctatgaggaagaattgagaggggcacctatttctgtaaaatccccaaattggtgttgatgattttgagcttgaatgttttcatacctgattaaaacttggtttattctaatttctgtatcatatcatctgaggtttacgtggtaactagtcttataacatgtatgtatcttttttttgttgttcatctaaagctttttaatccaaataaatacagagtttgcaaagtga

SEQ ID NO: 12 - DNA, 1051 bp, Homo sapiens
ggagccgcctcgctcctcttcagggactttgctgagaagggctctcgggcgtccagaccccaccgcaaaggtgtttggcgatccgcgagaagttgttggccccaggagcatccctcggggccgaatgcgcagtgggacgatgccccttctgacccaacagatccaagacgaggatgatcagtacagccttgtggccagccttgacaacgttaggaatctctccactatcttgaaagctattcatttccgagaacatgccacgtgtttcgcaactaaaaatggtatcaaagtaacagtggaaaatgcaaagtgtgtgcaagcaaatgcttttattcaggctggaatatttcaggagtttaaagttcaggaagagtctgttacttttcgaattaatttaactgtccttttagactgtttatctatttttggatcaagtcctatgccagggactttaactgcacttcgaatgtgttaccaaggttatggttaccctttgatgctgttcctggaagaaggaggagtggtgacagtctgcaaaatcaatacacaggaacctgaggagaccctggactttgatttctgcagcaccaatgttattaataaaattattctgcagtcagaggggctccgtgaagcattttctgaattggatatgacgagtgaagtcctacaaattaccatgtctcctgacaagccttatttcaggttatctacttttggaaatgcaggaagttcccaccttgactatcccaaagattctgatttgatggaagcatttcattgtaatcagacccaagtcaacagatacaagatttccttactgaaaccctctacaaaggcattagtcctatcttgtaaggtatctattcggacagataacagaggcttcctttcattacagtatatgattagaaatgaagatggacaaatatgttttgtggaatattactgctgccctgatgaagaagttcctgaatctgagtcttgagtatgacaattcactgatatttatgtgtacatttatgatagatgaagttcttattctgagtac

SEQ ID NO: 13 - DNA, 1290 bp, Homo sapiens
gtgagcggcaacatggcgtccaggtctaagcggcgtgccgtggaaagtggggttccgcagccgccggatcccccagtccagcgcgacgaggaagaggaaaaagaagtcgaaaatgaggatgaagacgatgatgacagtgacaaggaaaaggatgaagaggacgaggtcattgacgaggaagtgaatattgaatttgaagcttattccctatcagataatgattatgacggaattaagaaattactgcagcagctttttctaaaggctcctgtgaacactgcagaactaacagatctcttaattcaacagaaccatattgggagtgtgattaagcaaacggatgtttcagaagacagcaatgatgatatggatgaagatgaggtttttggtttcataagccttttaaatttaactgaaagaaagggtacccagtgtgttgaacaaattcaagagttggttctacgcttctgtgagaagaactgtgaaaagagcatggttgaacagctggacaagtttttaaatgacaccaccaagcctgtgggccttctcctaagtgaaagattcattaatgtccctccacagatcgctctgcccatgtaccagcagcttcagaaagaactggcgggggcacacagaaccaataagccatgtgggaagtgctacttttaccttctgattagtaagacatttgtggaagcaggaaaaaacaattccaaaaagaaacctagcaacaaaaagaaagctgcgttaatgtttgcaaatgcagaggaagaatttttctatgaggagcagggaaaacctgaggtgcttggaggtccagacacaagaagaggattggaaccagttccgatacagcacaatggtggttcacgggggcaagtgacagccctggtttctctgaaggctggactaattcaatcaagatcaactctaagtgatttccagggaaccttcatgactgttggaattgctctgtcataataagtcagggatatttaggaggctcatagtctcctggagggataaaacatctcggcacctagtaatggtaaattagtcaatatttgttagtttcgtttgagatctcaaatgttaggattttctgaagtctcagtgtctttcagagtttgagataccttgttttcattttttctaatttttaatttaaaagtaataaagaatattttgtaatgattaggatgaaaattttatcgtcaattataagccaaaatttgctaaaattaaagtcagtatacttggaaaaaaaaaaaaaaaaaaaaaaaaaaaaaa

SEQ ID NO: 14 - DNA, 599 bp, Homo sapiens
aggccgcgctcgcgccgaggggctgcgagagtgaccgcggctgctccagcgctgacgccgagccatggcggacgaggagcttgaggcgctgaggagacagaggctggccgagctgcaggccaaacacggggatcctggtgatgcggcccaacaggaagcaaagcacagggaagcagaaatgagaaacagtatcttagcccaagttctggatcagtcggcccgggccaggttaagtaacttagcacttgtaaagcctgaaaaaactaaagcagtagagaattaccttatacagatggcaagatatggacaactaagtgagaaggtatcagaacaaggtttaatagaaatccttaaaaaagtaagccaacaaacagaaaagacaacaacagtgaaattcaacagaagaaaagtaatggactctgatgaagatgacgattattgaactacaagtgctcacagactagaacttaacggaacaagtctaggacagaagttaagatctgattatttactttgtttattgtctatatgccttttaaaaaaataaacttgttatgcaaaataaaaaaaaaaaaaaaaaaaaaaaaaaaaaaaaaaaa

SEQ ID NO: 15 - DNA, 412 bp, Homo sapiens
ctcctggagagagacacttcctttaccgtctgtccagatgtccctagaactccagtgggcaaatttcttggtgattctgcaaacctaagcattttgtctggaggaaccccaaaatgttgcctcgatctttcgaatcttagcagtggggagataactgccactcagcttaccacttctgcagaccttgatgaaactggtcacctggattcttcaggacttcaggaagtgcatttagctgggatgacaatggaaacttggtggacagtgaaatgaaatatttgggcagtcccattactactgttccaaaattggataaaaatccaaacctaggagaagaccaggcagaagagatttcagatgaattaatggagttttccctgaaagatcaagaagcaaaggtgagcagaagtgg

SEQ ID NO: 16 - DNA, 3861 bp, Homo sapiens
gcggccgctctcagcggagggggcggccccggggcccaggcgccgcggcccggcaccccgtggaagagccgcgcgtacagcccgggcatccagggactacatgaggaaataattgacttttataacttcatgtccccttgtcctgaagaagcagctatgagaagagaggtggtgaaacggatcgaaactgtggtgaaagacctttggccgacggctgatgtacagatatttggcagctttagtacaggtctttatcttccaactagcgacatagacctggtggtcttcgggaaatgggagcgtcctcctttacagctgctggagcaagccctgcggaagcacaacgtggctgagccgtgttccatcaaagtccttgacaaggctacggtaccaataataaagctcacagatcaggagactgaagtgaaagttgacatcagctttaacatggagacgggcgtccgggcagcggagttcatcaagaattacatgaagaaatattcattgctgccttacttgattttagtattgaaacagttccttctgcagagggacctgaatgaagtttttacaggtggaattagctcatacagcctaattttaatggccattagctttctacagttgcatccaagaattgatgcccggagagctgatgaaaaccttggaatgcttcttgtagaattttttgaactctatgggagaaattttaattacttgaaaaccggtattagaatcaaagaaggaggtgcctatatcgccaaagaggagatcatgaaagccatgaccagcgggtacagaccgtcgatgctgtgcattgaggaccccctgctgccagggaatgacgttggccggagctcctatggcgccatgcaggtgaagcaggtcttcgattatgcctacatagtgctcagccatgctgtgtcaccgctggccaggtcctatccaaacagagacgccgaaagtactttaggaagaatcatcaaagtaactcaggaggtgattgactaccggaggtggatcaaagagaagtggggcagcaaagcccacccgtcgccaggcatggacagcaggatcaagatcaaagagcgaatagccacatgcaatggggagcagacgcagaaccgagagcccgagtctccctatggccagcgcttgactttgtcgctgtccagcccccagctcctgtcttcaggctcctcggcctcttctgtgtcttcactttctgggagtgacgttgattcagacacaccgccctgcacaacgcccagtgtttaccagttcagtctgcaagcgccagctcctctcatggccggcttacccaccgccttgccaatgcccagtggcaaacctcagcccaccacttccagaacactgatcatgacaaccaacaatcagaccaggtttactatacctccaccgaccctaggggttgctcctgttccttgcagacaagctggtgtagaaggaactgcgtctttgaaagccgtccaccacatgtcttccccggccattccctcagcgtcccccaacccgctctcgagccctcatctgtatcataagcagcacaacggcatgaaactgtccatgaagggctctcacggccacacccaaggcggcggctacagctctgtgggtagcggaggtgtgcggccccctgtgggcaacaggggacaccaccagtataaccgcaccggctggaggaggaaaaaacacacacacacacgggacagtctgcccgtgagcctcagcagataatggctcctggctgcgtcagcctcccccacccctctgcagactgccccgcggcctcggccaccggcaggggaaccgagaccagcaccccgcacgtcagccgggctcgcggcacgcccgccgctgatcactctgcatgtttcttcgtgtggtggtcgcgtccatcttcaagaacagctcgttgtgctcatctgtgaagccttattaaacgtggacgttgttttctgccttcccaggattcttccttcagtgctgaggcaggtcgggctcaggaactgcagggacgtgaacatgcgcttgcggtttgaggtagccgtgtctgttccttcgcggtttgctattttcatttcctgttcgtcaaagcagcagaggagatcaaaccccgttcgtgtgtctttcctccacggataagcttgggaggtcattgttttactgccctcacattttgtttgaaatttcagaactgtttttctatgtaaatattgaaaacttatgatttgtgcaataactcagatattttttatttaatttcctattttcacataagttatatttaagggaggagggaattttttttaaacaagcttaggtcctttcccgagctgcattttctaagttgggtcatcgtgtcggctggttgtctgacgagcatcgttacaaacaccatgatgaggggtttggggttttattttgatgtcttttcttttggtcggaagtgagtgaaggagccaggtcgccctgaaggttttccaaagggcttggctccagagccacctggcagactgcccgtggccctgctgtcgggccccaggccgttgtcctgctctgaccacagagttttaatgttttggttttcacttcttttaaactggacaacaaatccagcatttcaagtgccagaagtataactttctaaggagagaagggttgtcacattataaaatctttaggaaaatgtgaactggaaaacgcttcggtcagttttagtgacatagcctgtgatgatgggtctggtgactattattgcggaccgtggtacccagttttaggaatgtggagaaaggaattctgttgattccgttgaggaatctgtagcgtatgcattcgttctgttaagagcaaatctaggagaagtgcttcagctgcccagtgcgccgtggggagtgttttaacggatcgtgtcgcaggagagcacagcccagcgttggggccgggaccgctggcgcccgacgtcggaagcatacaggtatactatgcaagtgtattctgccacaacaaccactgtctttgttacctttttttgaacaagaatatatccatcctgcctaaccctgagtttttggagcaccacagttgtcctgggagttggttgcatcttgtaggccatctgacttcctgtttttaaaacgggggtctggtcttgctaaacactacaggtaggttggtctttgaagtccactagtggagaatgtcaagacaagatacttattaccatgacatctgatgcatgtgcagcagtggggagttctagattgatctctgaatgtgatcgacgcccagcaaggacaagctttaaaatgtctgcggtctgcccttttgaagcaggactggctcactctgtcattgggagctgtcagctgcgactgcaggttctctaggaggcattccagaatagagtagcacactgtgtctgcagttctcgatgaccgaaagttatcaaaaatatttaaaatatttaaattgtgaacctattgataaagaatatttataaaaactgatctgtaggcctgtactaatctctacgcattagcaatattgactgtaaacccacattaaggaaaccactacgggtctggcagtgcgtgtcccgtggggtgtgcattttaaaactcgattcatagacacaggtaccatgttccatttccgtcatggtgaagcaaatgaattggcctggctaccactgtggtcgcgtgctacaggtttgacaaaaagatatcatgtttcgatttttttgtgtgtggacaacaatatggaagctaaaattgacatatttttatgtaaagtttttctattctttgatttttaataaactttggaaaccagttt

SEQ ID NO: 17 - DNA, 1235 bp, Homo sapiens
ggggggggggggcacttggcttcaaagctggctcttggaaattgagcggagagcgacgcggttgttgtagctgccgctgcggccgccgcggaataataagccgggatctaccatacccattgactaactatggaagattataccaaaatagagaaaattggagaaggtacctatggagttgtgtataagggtagacacaaaactacaggtcaagtggtagccatgaaaaaaatcagactagaaagtgaagaggaaggggttcctagtactgcaattcgggaaatttctctattaaaggaacttcgtcatccaaatatagtcagtcttcaggatgtgcttatgcaggattccaggttatatctcatctttgagtttctttccatggatctgaagaaatacttggattctatccctcctggtcagtacatggattcttcacttgttaagagttatttataccaaatcctacaggggattgtgttttgtcactctagaagagttcttcacagagacttaaaacctcaaaatctcttgattgatgacaaaggaacaattaaactggctgattttggccttgccagagcttttggaatacctatcagagtatatacacatgaggtagtaacactctggtacagatctccagaagtattgctggggtcagctcgttactcaactccagttgacatttggagtataggcaccatatttgctgaactagcaactaagaaaccacttttccatggggattcagaaattgatcaactcttcaggattttcagagctttgggcactcccaataatgaagtgtggccagaagtggaatctttacaggactataagaatacatttcccaaatggaaaccaggaagcctagcatcccatgtcaaaaacttggatgaaaatggcttggatttgctctcgaaaatgttaatctatgatccagccaaacgaatttctggcaaaatggcactgaatcatccatattttaatgatttggacaatcagattaagaagatgtagctttctgacaaaaagtttccatatgttatgtcaacagatagttgtgtttttattgttaactcttgtctatttttgtcttatatatatttctttgttatcaaacttcagctgtacttcgtcttctaatttcaaaaatataacttaaaaatgtaaatattctatatgaatttaaatataattctgtaaatgtgaaaaaaaaaaaaaaaaaaaaa

SEQ ID NO: 18 - DNA, 1997 bp, Homo sapiens
cctccctccctccccgtctttcttaccccctccctttctctctctctctctctctcgctcgttccctaacattaaagagaaaatgctgctatccgtgacttccaggcccgggatttcgacttttggctacaatagaaacaacaagaagccatatgtgtcattggctcagcagatggcaccacctagcccaagcaacagtacacctaacagcagtagtggaagcaatggaaatgaccagctgagcaaaaccaacctatacatccgaggattgcaaccaggcactactgaccaagatcttgtcaagctgtgtcagccatatggcaagattgtttccactaaggccatactggacaagaccacaaacaaatgtaaaggctatggctttgtagattttgacagcccttcagcagcacagaaagctgtaacagcactgaaggccagcggtgtacaggcacagatggcaaagcaacaggaacaggaccccacaaatttatacatctcaaacctcccactgtcaatggatgagcaggaactggaggggatgctgaagccctttggccaggttatctccacccgtatccttcgagataccagtgggaccagcagaggtgttggctttgcaaggatggagtccacagagaagtgtgaagccatcatcacccactttaatggaaaatatattaagacaccccctggagtaccagccccatccgatcccttgctttgcaaatttgctgatggcgggccaaagaaacgacagaaccaaggaaaatttgtgcaaaatggacgggcttggccaaggaatgcagacatgggcgtcatggccttgacctatgaccccaccacagctcttcagaatgggttttacccagccccctataacatcacccccaacaggatgcttgctcagtctgcactctccccatacctttcctctcctgtgtcttcgtatcagagagtgactcagacatctcctctacaagtacctaacccatcctggatgcaccaccattcatacctcatgcagccttcaggttcagttctgacaccagggatggaccatcccatttctctccagcctgcctccatgatgggaccccttacccagcaactgggccatctctccctcagcagcacaggcacgtatatgccgacggctgcagctatgcaaggagcttacatctcccagtacacccctgtgccttcttccagtgtttcagtcgaggagagcagcggccaacagaaccaagtggcagtggacgcaccctcagagcatggggtctattctttccagttcaacaagtaacagtgggattcccctccccatctttactgaatagaaatgaattcttggagatactcatgctcccagattccagagggttaaccaggaatggagaccatccgtcggccctgctaaggactaacacttagccatcgtttttcacaggcctgggcctggaaaaagaaatctctacgttcctgccctttactattgctgatggagcctgggggaaccatcactttttttgtgtgctacattcaaggagatcaaaaaaacttttcttcttttgcaaagaaagctttttgtttttaactgcaacgtacttttcccctaccttgaagagacatggtggtcgcagcttctcatctatatgaaaaagttttcgatgtattggaattatttgggaatgcttttaaaacaatttgtaattatttctttacaaaccaaaacagaacagaaaggtgtggtgctggaacatcgatgaaggagccctacttactgagcttagttatggacttttttgatgcatgtgtgtatgtgttttaaaaagtatgcaggctctaaaaatgttattttgtaaagctctcagctcatgcaccccatctcctcttcacccatattatgccttctttctcttgtccagattcttctttttctcttttctaaacagctgagcctgcctactttgcccttttacagcttttaattttat

SEQ ID NO: 19 - DNA, 1833 bp, Homo sapiens
cctcgcagcggtctgcggctccttcccagcccccggcctagctctgcgaacggtgactgcccatccttggccgcaatgagccaccacccgtcgggcctccgggccggcttcagctccacctcataccgccgtaccttcggtccaccgccctcactatcccccggggccttctcctactcgtccagctcccgcttctccagcagccgcctgctgggctccgcgtccccgagctcctcggtgcgcctgggcagcttccgtagcccccgagcgggagcgggcgccctcctgcgcctgccctcggagcgcctcgacttctccatggccgaggccctcaaccaggagttcctggccacgcgcagcaacgagaagcaggagctgcaggagctcaacgaccgcttcgccaacttcatcgagaaggtacgctttctggagcagcagaacgcggccctgcgcggggagctgagccaagcccggggccaggagccggcgcgcgccgaccagctgtgccagcaggagctgcgcgagctgcggcgagagctggagctgttgggccgcgagcgtgaccgggtgcaggtggagcgcgacgggctggcggaggacctggcggcgctcaagcagaggttggaggaggagacgcgcaagcgggaggacgcggagcacaacctcgtgctcttccgcaaggacgtggacgatgccactctgtcccgcctggaactagagcgcaagattgagtctctgatggatgagattgagttcctcaagaagctgcacgaggaggagctgcgagacctgcaggtgagtgtggagagccagcaggtgcagcaggtggaggtggaagccacggtgaagcccgagctgacggcagcgctgagggacatccgcgcgcagtacgagagcatcgccgcgaagaacctgcaggaggcggaggagtggtacaagtccaagtacgcggacctgtccgacgctgccaaccggaaccacgaggccctgcgccaggccaagcaggagatgaacgagtcccgacgccagatccagagtctaacgtgcgaggtggacgggctgcgcggcacgaacgaggcgctgctcaggcagttgagagagctggaggagcagttcgccctggaggcggggggctaccaggcgggcgctgcgcggctcgaggaggagctgcgacagctaaaagaggagatggcgcggcacctgagggagtaccaggagctcctcaacgtcaagatggccctggacatcgagatcgccacctaccgcaagctgctggagggcgaggagagccggatctccgtgcccgtccattcttttgcctccttaaatataaagacgactgtgcctgaggtggagcctccccaggacagccacagccggaagacggttctgatcaagaccattgagacccggaatggggaggtggtgacagagtcccagaaggagcagcgcagtgagctggacaagtcttctgcccacagttactgaaccccttggtccggagccttgactctgccctaggcctgctcaaagcccaaaccctaagaccactcctgaattgtctcctctccctctgcatgtgtctaaaaggtggtaccaggcatccctttcctggcttatggccaagccctacccggccagcagtcgctgggcctctccctgccctgacacttgatgtgacctatgtgcttcccttttcatgtcccgataagaagccaatgatcccccctcaggacaaatctactccagccacgatgagaagtgggtgagccagggtctgagtttcacatttgaaccaaataaaatgctgtcaagagaaaactctccagtgca

SEQ ID NO: 20 - DNA, 1336 bp, Homo sapiens
ggctggtggaacccctgcacagagacggacacaggatgagctctaagtacccgcggtctgtccggcgctgcctgcccctctgggccctaacactggaagcagctctcattctcctcttctatttttttacccactatgacgcttccttagaggatcaaaaggggctcgtggcatcctatcaagttggccaagatctgaccgtgatggcggccattggcttgggcttcctcacctcgagtttccggagacacagctggagcagtgtggccttcaacctcttcatgctggcgcttggtgtgcagtgggcaatcctgctggacggcttcctgagccagttcccttctgggaaggtggtcatcacactgttcagtattcggctggccaccatgagtgctatgtcggtgctgatctcagcgggtgctgtcttggggaaggtcaacttggcgcagttggtggtgatggtgctggtggaggtgacagctttaggcaccctgaggatggtcatcagtaatatcttcaacacagactaccacatgaacctgaggcacttctacgtgttcgcagcctattttgggctgactgtggcctggtgcctgccaaagcctctacccaagggaacggaggataatgatcagagagcaacgatacccagtttgtctgccatgctgggcgccctcttcttgtggatgttctggccaagtgtcaactctgctctgctgagaagtccaatccaaaggaagaatgccatgttcaacacctactatgctctagcagtcagtgtggtgacagccatctcagggtcatccttggctcacccccaaaggaagatcagcatgacttatgtgcacagtgcggtgttggcaggaggcgtggctgtgggtacctcgtgtcacctgatcccttctccgtggcttgccatggtgctgggtcttgtggctgggctgatctccgtcgggggagccaagtacctgccggggtgttgtaaccgagtgctggggattccccacagctccatcatgggctacaacttcagcttgctgggtctgcttggagagatcatctacattgtgctgctggtgcttgataccgtcggagccggcaatggcatgattggcttccaggtcctcctcagcattggggaactcagcttggccatcgtgatagctctcacgtctggtctcctgacaggtttgctcctaaatcttaaaatatggaaagcacctcatgaggctaaatattttgatgaccaagttttctggaagtttcctcatttggctgttggattttaagcaaaagcatccaagaaaaacaaggcctgttcaaaaacaagacaact

SEQ ID NO: 21 - DNA, 3063 bp, Homo sapiens
cgccggcggggaagatgaccgcgggcgccggcgtgctccttctgctgctctcgctctccggcgcgctccgggcccataatgaggatcttacaactagagagacctgcaaggctgggttctctgaagatgattacacggcattaatctcccaaaatattctagaaggggaaaagctacttcaagtcaagttcagcagctgtgtggggaccaaggggacacaatatgagaccaacagcatggacttcaaagttggggcagatgggacagtcttcgccacccgggagctgcaggtcccctccgagcaggtggcgttcacggtgactgcatgggacagccagacagcagagaaatgggacgccgtggtgcggttgctggtggcccagacctcgtccccgcactctggacacaagccgcagaaaggaaagaaggtcgtggctctggacccctctccgcctccgaaggacaccctgctgccgtggccccagcaccagaacgccaacgggctgaggcggcgcaaacgggactgggtcatcccgcccatcaacgtgcccgagaactcgcgcgggcccttcccgcagcagctcgtgaggatccggtccgacaaagacaatgacatccccatccggtacagcatcacgggagtgggcgccgaccagccccccatggaggtcttcagcattgactccatgtccggccggatgtacgtcacaaggcccatggaccgggaggagcacgcctcttaccacctccgagcccacgctgtggacatgaatggcaacaaggtggagaaccccatcgacctgtacatctacgtcatcgacatgaatgacaaccgccctgagttcatcaaccaggtctacaacggctccgtggacgagggctccaagccaggcacctacgtgatgaccgtcacggccaacgatgctgacgacagcaccacggccaacgggatggtgcggtaccggatcgtgacccagaccccacagagcccgtcccagaatatgttcaccatcaacagcgagactggagatatcgtcacagtggcggctggcctggaccgagagaaagttcagcagtacacagtcatcgttcaggccacagatatggaaggaaatctcaactatggcctctcaaacacagccacagccatcatcacggtgacagatgtgaatgacaacccgccagaatttaccgccagcacgtttgcaggggaggtccccgaaaaccgcgtggagaccgtggtcgcaaacctcacggtgatggaccgagatcagccccactctccaaactggaatgccgtttaccgcatcatcagtggggatccatccgggcacttcagcgtccgcacagaccccgtaaccaacgagggcatggtcaccgtggtgaaggcagtcgactacgagctcaacagagctttcatgctgacagtgatggtgtccaaccaggcgcccctggccagcggaatccagatgtccttccagtccacggcaggggtgaccatctccatcatggacatcaacgaggctccctacttcccctcaaaccacaagctgatccgcctggaggagggcgtgccccccggcaccgtgctgaccacgttttcagctgtggaccctgaccggttcatgcagcaggctgtgagatactcaaagctgtcagacccagcgagctggctgcacatcaatgccaccaacggccagatcaccacggcggcagtgctggaccgtgagtccctctacaccaaaaacaacgtctacgaggccaccttcctggcagctgacaatgggatacccccggccagcggcaccgggaccctccagatctatctcattgacatcaacgacaacgcccctgagctgctgcccaaggaggcgcagatctgcgagaagcccaacctgaacgccatcaacatcacggcggccgacgctgacgtcgaccccaacatcggcccctacgtcttcgagctgccctttgtcccggcggccgtgcggaagaactggaccatcacccgcctgaacggtgactatgcccaactcagcttgcgcatcctgtacctggaggccgggatgtatgacgtccccatcatcgtcacagactctggaaaccctcccctgtccaacacgtccatcatcaaagtcaaggtgtgcccatgtgatgacaacggggactgcaccaccattggcgcagtggcagcggctggtctgggcaccggtgccatcgtggccatcctcatctgcatcctcatcctgctgaccatggtcctgctgtttgtcatgtggatgaagcggcgagagaaggagcgccacacgaagcagctgctcattgaccccgaggacgacgtccgcgacaacatcctcaagtatgacgaggaaggcggtggcgaggaggaccaggactacgacctcagccagctgcagcagccggaagccatggggcacgtgccaagcaaagcccctggcgtgcgtcgcgtggatgagcggccggtgggcgctgagccccagtacccgatcaggcccatggtgccgcacccaggcgacatcggtgacttcatcaatgagggactccgcgctgctgacaacgaccccacggcacccccctatgactccctgctggtcttcgactacgaggggagcggctccaccgcaggctccgtcagctccctgaactcatccagttccggggaccaagactacgattacctcaacgactgggggcccagattcaagaagctggcggacatgtatggaggtggtgaagaggattgactgacctcgcatcttcggaccgaagtgagagccgtgctcggacgccggaggagcaggactgagcagaggcggccggtcttcccgactccctgcggctgtgtccttagtgctgttaggaggccccccaatccccacgttgagctgtctagcatgagcacccacccccacagcgccctgcacccggccgctgcccagcaccgcgctggctggcactgaaggacagcaagaggcactctgtcttcacttgaatttcctagaacagaagcactgtttttaaaaaaaaaaaaaaaaaaagaag

SEQ ID NO: 22 - DNA, 1494 bp, Homo sapiens
ccccacccgaaacacactcagcccttgcactgacctgccttctgattggaggctggttgcttcggataatgacctccaggaccccactgttggttacagcctgtttgtattattcttactgcaactcaagacacctgcagcagggcgtgagaaaaagtaaaagaccagtattttcacattgccaggtaccagaaacacagaagactgacacccgccacttaagtggggccagggctggtgtctgcccatgttgccatcctgatgggctgcttgccacaatgagggatcttcttcaatacatcgcttgcttctttgcctttttctctgctgggtttttgattgtggccacctggactgactgttggatggtgaatgctgatgactctctggaggtgagcacaaaatgccgaggcctctggtgggaatgcgtcacaaatgcttttgatgggattcgcacctgtgatgagtacgattccatacttgcggagcatcccttgaagctggtggtaactcgagcgttgatgattactgcagatattctagctgggtttggatttctcaccctgctccttggtcttgactgcgtgaaattcctccctgatgagccgtacattaaagtccgcatctgctttgttgctggagccacgttactaatagcaggtaccccaggaatcattggctctgtgtggtatgctgttgatgtgtatgtggaacgttctactttggttttgcacaatatatttcttggtatccaatataaatttggttggtcctgttggctcggaatggctgggtctctgggttgctttttggctggagctgttctcacctgctgcttatatctttttaaagatgttggacctgagagaaactatccttattccttgaggaaagcctattcagccgcgggtgtttccatggccaagtcatactcagcccctcgcacagagacggccaaaatgtatgctgtagacacaagggtgtaaaatgcacgtttcagggtgtgtttgcatatgatttaatcaatcagtatggttacattgataaaatagtaagtcaatccaggaacagttatttagaattcatattgaattaaattaattgctagcttaatcaaaatgtttgattctcctatactttttctttctattactcttatattttcccgtcattctctctgctaaccttccaccttatgcacacactttccctatattttaagataagtctgctaggatgtagaaatatttgtttgtgatttctatatagctattagagattatgacatagtaatattaaaatgaaatgatacttaaacagaaagcaatttccaaagaggccagggaccctaatctttgaagagatgaagaaacttacttttctccctggcttttggttcactttttgtacttttaacaagtgggtgaattatttgataattttgaggaagattattcttttaaattcaaactagtatgtcaatgcctaccatta

SEQ ID NO: 23 - DNA, 2923 bp, Homo sapiens
acatctggctgggcttcgctccttgcgcgtctgtcccactttctccctctcttcctttactttcgagaaaccgcgcttccgcttctggtcgcagagacctcggagaccgcgccggggagacggaggtgctgtgggtgggggggacctgtggctgctcgtaccgccccccaccctcctcttctgcactgccgtcctccggaagaccttttcccctgctctgtttccttcaccgagtctgtgcatcgccccggacctggccgggaggaggcttggccggcgggagatgctctaggggcggcgcgggaggagcggccggcgggacggagggcccggcaggaagatgggctcccgtggacagggactcttgctggcgtactgcctgctccttgcctttgcctctggcctggtcctgagtcgtgtgccccatgtccagggggaacagcaggagtgggaggggactgaggagctgccgtcgcctccggaccatgccgagagggctgaagaacaacatgaaaaatacaggcccagtcaggaccaggggctccctgcttcccggtgcttgcgctgctgtgaccccggtacctccatgtacccggcgaccgccgtgccccagatcaacatcactatcttgaaaggggagaagggtgaccgcggagatcgaggcctccaagggaaatatggcaaaacaggctcagcaggggccaggggccacactggacccaaagggcagaagggctccatgggggcccctggggagcggtgcaagagccactacgccgccttttcggtgggccggaagaagcccatgcacagcaaccactactaccagacggtgatcttcgacacggagttcgtgaacctctacgaccacttcaacatgttcaccggcaagttctactgctacgtgcccggcctctacttcttcagcctcaacgtgcacacctggaaccagaaggagacctacctgcacatcatgaagaacgaggaggaggtggtgatcttgttcgcgcaggtgggcgaccgcagcatcatgcaaagccagagcctgatgctggagctgcgagagcaggaccaggtgtgggtacgcctctacaagggcgaacgtgagaacgccatcttcagcgaggagctggacacctacatcaccttcagtggctacctggtcaagcacgccaccgagccctagctggccggccacctcctttcctctcgccaccttccacccctgcgctgtgctgaccccaccgcctcttccccgatccctggactccgactccctggctttggcattcagtgagacgccctgcacacacagaaagccaaagcgatcggtgctcccagatcccgcagcctctggagagagctgacggcagatgaaatcaccagggcggggcacccgcgagaaccctctgggaccttccgcggccctctctgcacacatcctcaagtgaccccgcacggcgagacgcgggtggcggcagggcgtcccagggtgcggcaccgcggctccagtccttggaaataattaggcaaattctaaaggtctcaaaaggagcaaagtaaaccgtggaggacaaagaaaagggttgttatttttgtctttccagccagcctgctggctcccaagagagaggccttttcagttgagactctgcttaagagaagatccaaagttaaagctctggggtcaggggaggggccgggggcaggaaactacctctggcttaattcttttaagccacgtaggaactttcttgagggataggtggaccctgacatccctgtggccttgcccaagggctctgctggtctttctgagtcacagctgcgaggtgatgggggctggggccccaggcgtcagcctcccagagggacagctgagccccctgccttggctccaggttggtagaagcagccgaagggctcctgacagtggccagggacccctgggtcccccaggcctgcagatgtttctatgaggggcagagctcctggtacatccatgtgtggctctgctccacccctgtgccaccccagagccctggggggtggtctccatgcctgccaccctggcatcggctttctgtgccgcctcccacacaaatcagccccagaaggccccggggccttggcttctgttttttataaaacacctcaagcagcactgcagtctcccatctcctcgtgggctaagcatcaccgcttccacgtgtgttgtgttggttggcagcaaggctgatccagaccccttctgcccccactgccctcatccaggcctctgaccagtagcctgagaggggctttttctaggcttcagagcaggggagagctggaaggggctagaaagctcccgcttgtctgtttctcaggctcctgtgagcctcagtcctgagaccagagtcaagaggaagtacacgtcccaatcacccgtgtcaggattcactctcaggagctgggtggcaggagaggcaatagcccctgtggcaattgcaggaccagctggagcagggttgcggtgtctccacggtgctctcgccctgcccatggccaccccagactctgatctccaggaaccccatagcccctctccacctcaccccatgttgatgcccagggtcactcttgctacccgctgggcccccaaacccccgctgcctctcttccttccccccatcccccacctggttttgactaatcctgcttccctctctgggcctggctgccgggatctggggtccctaagtccctctctttaaagaacttctgcgggtcagactctgaagccgagttgctgtgggcgtgcccggaagcagagcgccacactcgctgcttaagctcccccagctctttccagaaaacattaaactcagaattgtgttttcagcaaaaaaaaaaaaaaaaaaaaaaaaaaaaaaaaaaaaaa

SEQ ID NO: 24 - DNA, 2523 bp, Homo sapiens
atcccggctgctgcgcggcgtcggcgacggtagcggcagcggcggcgaaggcgggcggcggcctacagtggtagcggcggcggcggcgaccggggcccgggagctcgcgccggagcccgagccaacccgctgcggaggcagacgagagcccagcgccctcgagcgagcggaggagatggctggcacctgggaacgctatgggtgaaagcccagcctccgtggttcttaatgcctcaggaggactattttcactaaagatggaaacactggagtctgaattgacctgtccaatctgcctagagttgtttgaagacccccttctgctcccttgtgctcacagcctctgcttcagctgtgcccatcgcattttggtatcaagctgcagctctggtgaatccattgaacccattactgctttccagtgtcctacctgcaggtatgttatctcgctgaaccaccggggcctggatggcctcaagaggaatgtgactctgcagaacattattgatcgcttccagaaggcttcagtcagtgggcccaattcccctagtgagagccgccgggaaaggacttacaggcccaccactgccatgtctagcgagcgaattgcttgccaattctgtgagcaggacccgccaagggatgcagtaaaaacatgcatcacctgtgaggtctcctactgtgaccgttgcctgcgggccacgcaccccaacaagaaacctttcaccagccaccgcctggtggaaccagtgccagacacacatcttcgagggatcacctgcctggaccatgagaatgagaaagtgaacatgtactgtgtatctgatgaccaattgatctgtgccttatgcaaactggtgggtcgtcaccgagaccatcaggtcgcatccctgaatgatcgatttgagaaactcaagcaaactctggagatgaacctcaccaacctggttaagcgcaacagcgaactagaaaatcaaatggccaaactaatacagatctgccagcaggttgaggtgaatactgctatgcatgaggcaaaacttatggaagaatgtgacgagttggtagagatcatccagcagaggaagcaaatgatcgctgtcaaaatcaaagagacaaaggttatgaaactgagaaagttggcacagcaggttgctaattgccgccagtgtcttgaacggtcaacagtcctcatcaaccaagctgagcatatcctgaaagaaaatgaccaggcacggtttctacagtctgcaaaaaatattgctgagagggtcgctatggcaactgcatcttctcaagttctgattccagacatcaattttaatgatgcctttgaaaactttgctttagatttttccagagaaaagaaactgctagaggggttagattatttaacagccccaaacccaccatctatccgagaagaactctgtactgcctcccatgacaccattacagtccactggatctcggatgatgagttcagcatcagctcctatgagcttcagtacaccatattcactggccaggctaacttcatcagtaagtcatggtgtagttggggcctgtggccagagataaggaaatgtaaggaagcagtaagctgctcaagattggccggggcgccacgaggcctgtataattcagtagacagctggatgattgttcccaacattaaacagaaccattacacagtgcatggactccagagcgggactcgctacatcttcatcgttaaagccataaaccaagccggcagccggaacagtgaacctacccgactaaaaacaaacagccaaccctttaaattggatcccaaaatgactcacaagaagttgaagatctccaatgatggattgcagatggagaaggatgaaagctctctaaagaagagccacaccccagagaggtttagtggcacagggtgctatggggcagcaggaaatatattcattgacagtggctgccactattgggaggtggtcatgggttcctcaacatggtatgcaattggcattgcctacaaatcagctccaaagaatgaatggattggcaagaatgcctcctcatgggtcttctctcgctgcaatagtaacttcgtggtgagacacaacaacaaggaaatgctggtggatgtgcccccacacctgaagcgtctgggtgtcctcctggattatgacaacaatatgctgtctttctatgacccagctaactctctccatcttcatacttttgatgtgaccttcattcttccagtttgtccaacatttacaatctggaacaaatccctaatgatcctgtctggcttgcctgccccagattttattgattaccctgagcggcaggaatgcaactgcaggcctcaagaatccccttatgtttctgggatgaaaacctgtcattaagtttcaggagagtatataattcactggctctctagttcagcagttcttcccctcctacacctaagttagcgttcaatatacgagacacaaaataaagtttgtttgaagcatccaaaat

SEQ ID NO: 25 - DNA, 794 bp, Homo sapiens
gctgcattacagacacagacctgcaaacatctatggttgtgacagagtttctttctgacacctgagtctttctcctgctgcacggaaagcttgctgggaggggcttggaatctggcatgaagccaaagggcatctctgagttgcagcatttaaatgatcccactcagagattcacacagaagactggacacaattccgaagagctgcccagaaggagagaacaatgtcatcactacccgtaccatacacactgcctgtttccttgcctgttggttcgtgcgtgataatcacagggacaccgatcctcacttttgtcaaggacccacagctggaggtgaatttctacactgggatggatgaggactcagatattgctttccaattccgactgcactttggtcatcctgcaatcatgaacagttgtgtgtttggcatatggagatatgaggagaaatgctactatttaccctttgaagatggcaaaccatttgagctgtgcatctatgtgcgtcacaaggaatacaaggtaatggtaaatggccaacgcatttacaactttgcccatcgattcccgccagcatctgtgaagatgctgcaagtcttcagagatatctccctgaccagagtgcttatcagcgattgagggagatgatcagactcctcattgttgaggaatccctctttctacctgaccatgggattcccagagcctactaacagaataatccctcctcaccccttcccctacacttgatcattaaaacagcaccaaacttcaaaaaaaaaaaaaaaaa

SEQ ID NO: 26 - DNA, 3499 bp, Homo sapiens
gggaagtgggagagacagagggagagtgtgcatacagcagctgtcgggcatccctgtctcagggacttcttcgctgattcacagaggcagcccagccccggcctcccagcttacactgccgcctgcttctcagaacctgacggaatcagaagctacatgatattcgccgtgtgagtggctatcgtaatagataacatttgaatatctactaaatgccagaaactatgaattaactcctctcaacaaagctaagaggtgcttgatgatcaatagttggtgcactgcctatcctcatcccccccatgagccttggtttttatgcaacctatggtcatgcagggatgcccttacaccctcccacgatgtcatgactggcaggcagctgaccagttccatcatagcagcagcctccgaagcacctgcccccaccctcaggttagagctgctgtcaccagccctgcacctcctcaagatggtgctggggttccctgcctaagcctaaagctgttgaacgggtctgttggtgcctctggacccctggaaccaccagccatgaatctgtgttggaatgaaataaaaaagaagtctcacaacctccgcgctcgcctagaggccttctcagaccacagtggaaagcttcagctccctcttcaagagattattgactggctcagccaaaaggatgaggagttgtcagctcagctgcccctacagggggatgtggccctggtgcaacaggagaaggagacacatgcggcctttatggaagaagtcaagtctcgggccccctacatctattctgtgctggagtcagctcaggccttcctgtcccagcacccatttgaggagttagaggagcctcattctgagagcaaagatacctccccgaaacagcggatccagaatctcagccgctttgtatggaagcaggcgacggtggccagtgaactgtgggagaagttgacagcccgctgtgtggaccagcaccgtcacattgagcggactctggagcagctcttggagattcaaggggcaatggaggaactaagcactactctaagccaagctgagggagtccgagccacttgggagcccattggggatctcttcattgattcactcccagagcacatccaggctattaagctgttcaaagaagaattctcccccatgaaagatggagtaaagttggtgaatgatctggcccaccaacttgccatttctgatgtgcacttgtcaatggagaattcccaggccctggaacagatcaacgtccgatggaaacaactacaggcgtcagttgatgagaggcttaagcagctccaggatgcccaccgggactttgggcctgggtcacagcactttctctcctcctctgtccaggttccctgggaaagagcaatttcacccaataaagttccctactacatcaaccaccaggctcagaccacatgctgggaccatcccaagatgacagagttataccaaaccctagctgatctgaacaacattaagttctcagcttatcgcactgccatgaaactccgcagagtccagaaagccctgcgcttggacctggtaactttaaccacagccctggaaatcttcaatgagcatgatctgcaggccagtgagcacgtgatggatgtggtagaggtcattcactgcctgactgccttatatgaacgtttggaggaggaaagaggcatcctggtcaatgtgccactctgtgtggacatgagcctcaattggctcctcaatgtttttgatagtggtcgcagcggaaagatgcgggcattgtcttttaagactggcattgcatgcttgtgtggcacggaagtgaaggaaaaacttcagtacctcttcagccaagtggccaactcaggcagccagtgtgaccagcgccaccttggtgtcctgcttcatgaggccattcaggtgccccgtcagctgggtgaagtggcagcctttgggggcagcaatgtggagcccagtgtccgtagttgcttccgttttagcaccgggaagccagtcattgaagcatcccagttcctggagtgggtcaacctggagccccagtccatggtgtggctgcctgttctgcatcgggtaaccattgctgagcaagtgaagcatcagaccaagtgctctatctgtaggcagtgccccatcaaggggttcaggtaccggagtctgaagcaattcaacgttgacatctgccagacctgcttcttgacaggcagggccagcaaaggcaataagctgcactaccccatcatggagtattacacaccgaccacatccagtgagaacatgagggactttgccacaaccttaaagaacaaattccgctccaagcattatttcagcaaacaccctcagcgaggttatctgcctgtgcaatcagtgctggaggctgactacagtgagacgccggcttcttccccgatgtggccacacgccgacacacactcccgaattgagcattttgcgagcaggcttgctgagatggaaagtcaaaattgctccttctttaatgacagcttgtccccagatgacagcatagacgaggaccagtacctgctgcggcactccagccccatcacagaccgggagccagcctttggacagcaggctccatgcagtgtggctacagaaagcaaaggggagctacagaagatcctggcccacttggaagatgagaaccggattctccagggagagctgaggcgcctgaagtggcagcatgaggaggcagctgaggcacccagtctggctgacggctccactgaggcagcaacagaccaccgcaatgaggagcttctggccgaggcccgtatccttcggcaacataagagccgcctggagacgcgcatgcagatcctcgaagatcacaacaagcagctagagtcccagctgcagcgtctgagggagcttctcctgcagccacccaccgaatcagatggcagtggctctgcaggctcgtccctagcttcctctccacagcagtcagaaggcagtcacccccgggagaagggacagaccactccagataccgaggctgcagatgatgtggggtcaaagagccaggatgtcagcctgtgcttggaggacatcatggagaaactccgtcatgccttccccagtgtgcgaagttctgatgtgactgccaacaccctgctggcctcttgatggagccagatccccatcctatagttcatagtcctctcctggttccggtcaaagcctttcctcagccttcacccaacctttccagtttccactggccccacattcctcaactagtattatttgggctctgggcagcagcagggatctggtggtatgtgaggtgcatgcgggcagtgatgggagaaggggaggcatgattcttctgaccctagaaatgttccctttaatcttcaagttcgagatcagccctttaagtacctttctgttgcagcccaggcaaatatcacttggccattcagatggggag

SEQ ID NO: 27 - DNA, 2553 bp, Homo sapiens
atggccgctcaaaggaatcgctcaaaggaatcaaaggattgcagcgggctggtcctgctctgccttttcttcgggattccatgggaggctggagcccggcagatctcctactcaattcctgaggaattagagaaaggctctttcgtgggcaacatctccaaggacttgggtctggcgccccgggagctggcggagcgcggagtccgcatagtctccagaggtaggacgcagcttttctctctgaacccgcgcagcggcagcttgatcaccgcgggcaggatagaccgggaggagctctgcgctcagagcgcgcggtgcgtggtgagttttaatatccttgtggaagacagggtgaaactttttgggatagaaatagaagtaactgatatcaatgacaatgctccaaaattccaagcagaaaatctagacgtaaaaattaatgaaaatgtcgctgcgggaatgcgttttcctctcccggaagctattgatccggatgtgggcgtgaactccctgcagagctatcagctcagccccaataagcacttctccctaagagttcagagccgtgccaatggcgtcaagtacccggagctggtactggagcactccctagatcgcgaggaagaggccattcaccacctggtcctcaccgcctccgacgggggtgaccctctccgatctggcactgtccttgtcagtgtgactgtcttcgatgcaaatgacaacgcgccggtcttcaccttgccagaataccgagtgagtgttcctgagaatttgcctgtgggcactcagctgctgacagtcacagccaccgacagggacgaaggtgccaatggagaagtgacatattcattccgaaaattacctgacacgcaattgttgaagttccaactaaacaaatatactggagaaataaaaatatcagaaaatctagattatgaagaaaccggtttctatgaaatagaaatacaagcagaagatggaggagcatatcttgcaactgcaaaagtgttgattacagtagaagatgtaaatgacaacagtccagagctgaccatcacgtctctatttagtccagtgactgaagattcacctctgggaacagtcgtagcccttttaaatgtgcatgatttagactctgagcagaatggacaggtaacctgttccattttggcgtatctaccatttaaattagaaaagtccattgacagttattacagattggtgatacacagagcccttgacagggaacaggtatcctcttacaatatcacagtgacagccacagatgggggaagtcctcctctatcaacggaagctcactttatgctacaagtggcagatatcaatgacaacccacctaccttctctcaagtctcctactttacctatatcccagagaacaacgccaggggtgcctccatcttctcagtgacagcgctggacccggacagcaaagagaatgcccagattatttactccctggctgaagacaccatccagggggtacctctgtcctcatacatatccatcaactcagacactggcgtcctgtatgcactcagatccttcgactatgagcagtttcatgagctacagatgcaggtgacagccagcgacagcggggatcctccactcagcagcaacgtgtcgttgagcctgtttgtgctggaccagaacgacaatgcgcccgagatcctgtaccccgccctccccacagacggttccacaggcgtggagctggcgccccgctccgcagagcccggctacctggtgaccaaggtggtggcggtggacagagactccggccagaacgcctggctgtcctaccgtctgctcaaggccagcgagccgggactcttcgcggtgggggagcacacgggcgaggtgcgcacggcgcgagccctgctggacagagacgcgctcaagcaaagcctcgtagtggccgtccaggaccacggccagccccctctctccgccactgtcacgctcaccgtggccgtggccgacagcatcccccaagtcctggcggacctcggcagcttcgagtctccagctaactctgaaacctcagacctcactctgtacctggtggtagcggtggccgcggtctcctgcgtcttcctggccttcgtcatcgtgctgctggcgcacaggctgcggcgctggcacaagtcacgcctgctgcaggcttcaggaggcggcttgacaggtgtgtccggctcgcactttgtgggcgtggacggggttcgggctttcctgcagacctattcccacgaggtctctctcaccgcggactcgcgaaagagtcacctgatcttcccccagcccaattatgcggacacgctcatcagccaggagagctgtgagaaaaacgatcctttgtctttgttagatgattcgaagtttcctatagaggataccccattggttccagtgagttttattttcatttttacttttgttaaaaaaaaaaagattggtttttactttgaagtttgcggcatgatggtggaaagtgtaaatgctaaaacactgatgagtagaatttga

SEQ ID NO: 28 - DNA, 2682 bp, Homo sapiens
ctcatgcgtgcgtgcgtgcgtgcgtgtgtgtgtgtgtgtgcctctgctctttgtcctgagcccacgattccagagctggctggacccaaggaggtgaagagtcacttttcagccccaggaagggcaaagaagagagaaaatcagcctgtctgctctctccttggctcaacaaggcctctaacagtcttctgtcctctattctgcacacggcatatttgggaacgagaaacaaaagttttcccaaatgaagagaactcacttgtttattgtggggatttattttctgtcctcttgcagggcagaagaggggcttaatttccccacatatgatgggaaggaccgagtggtaagtctttccgagaagaacttcaagcaggttttaaagaaatatgacttgctttgcctctactaccatgagccggtgtcttcagataaggtcacgcaaaaacagttccaactgaaagaaatcgtgcttgagcttgtggcccaggtccttgaacataaagctataggctttgtgatggtggatgccaagaaagaagccaagcttgccaagaaactgggttttgatgaagaaggaagcctgtatattcttaagggtgatcgcacaatagagtttgatggcgagtttgcagctgatgtcttggtggagttcctcttggatctaattgaagacccagtggagatcatcagcagcaaactggaagtccaagccttcgaacgcattgaagactacatcaaactcattggctttttcaagagtgaggactcagaatactacaaggcttttgaagaagcagctgaacacttccagccttacatcaaattctttgccacctttgacaaaggggttgcaaagaaattatctttgaagatgaatgaggttgacttctatgagccatttatggatgagcccattgccatccccaacaaaccttacacagaagaggagctggtggagtttgtgaaggaacaccaaagacccactctacgtcgcctgcgcccagaagaaatgtttgaaacatgggaagatgatttgaatgggatccacattgtggcctttgcagagaagagtgatccagatggctacgaattcctggagatcctgaaacaggttgcccgggacaatactgacaaccccgatctgagcatcctgtggatcgacccggacgactttcctctgctcgttgcctactgggagaagactttcaagattgacctattcaggccacagattggggtggtgaatgtcacagatgctgacagtgtctggatggagattccagatgatgacgatcttccaactgctgaggagctggaggactggattgaggatgtgctttctggaaagataaacactgaagatgatgatgaagatgatgatgatgatgataattctgatgaagaggataatgatgacagtgatgacgatgatgatgaatagcccaactccaaacaattctgatgaaaacaaaatcacagcacccactaccatacagacagcacaaggtggcagcaagcaattctgccccacacccagccagctcctttcccttttccatcatctcttttcccactccctttgcgtcaggagcagcatcattcagcaaatgccttttcaaatgcagcaatcccacttagcagggacaggagaaaaattattcccatgttgactgtcttgactgtcacggaacagatcttgttctttgctggaccatcaagggtcatggcagtgcctgaacatggcagtctagggtgaacaatcccctaacacaagtttacttgtctttgattatgacagtaacaaaattgacagctttctaactcacaggcatagagtgaccttttaatcagagcccagggaagacacatgattaatgatttagctccctccatacctcgaacatcagttgggatccctcctccagccaagatgatccttcttagagaaggctcagccttggaagcaaacttataaatcatattctcatggctttgttaaacttatttcaagtgatggtcattcatatcactatgaacttggatattcaagcctttggatggctatggagagggcttgaaatgtgtacaggtgtcaccatcatttctagtatattaggaaactgggatgggaggttgatttgctctctaaacttccctctagttggcaagtctcacatattcatcagcaggagtggagggtgggggaaaactagaaagatgaaaacttttacatttttctgatgggttcatgtctctgattgggtcagctggcttcctagcctaagctgggatctgaataccccttctctgtagctgctagtgagccttcccatttagattaaagattgctttatccagcagtcaattaactctccagttatcagtactcccacaattggccagggcaacaataattggagttcatactgatgccctgaggcactgaaaaaaaaaaaaatcccaaagtgccttctgagctgtctaaaagttacattgtgcttggtagatttagtgttaagtgtgcagtataattttctaatttattttctcaatcttttagcacatgtgtaagacactgtgcaaattttttgaaaatagagcaatactttttgtggaatactagctaactaattctgtcattaaactcatattttgaaaatattcagacaatgttgaaaa

SEQ ID NO: 29 - DNA, 8052 bp, Homo sapiens
agagaggacttatctccagcatctagcactacagagcagaggctgtgtggagaatggctgaaaaatcagaattggttgtagaagcagttttctttctggttgtgagtatgagcccggcagacaccatgagcgctgttgcaggggagtcggcctgtgcttgacacatgtgtttcccattgatagctggagacagcccagtagctgtgagtcggtctgacaaagccatattgaagtacggagtacggtttcaaagcagtcagaaaaagaacgggaatgctgttcaggaaattcttcaggcatgggcagggacttggctgcagttctgcagttggaaaatctgactggggcagcttctgagcgcaggctgggcctgcacacactcagcgggccgagtggccacctccttcagagctgctcagcacgccctgggatcgcgggcggttttcatcggccggtttgtgaaacggacaagagagagacattactgccgggagtgttgagtgaagggaccaggtggagatgatgcctcaggagcagtacactcaccaccggagcaccatgcctggctctgtggggccacaggtatacaaggtggggatttatggctggcggaaacgatgcctgtatttctttgtcctgctcctcatgattttaatactggtgaacttggccatgaccatctggattctcaaagtcatgaacttcacaattgatggaatgggaaacctgaggatcacagaaaaaggtctaaagctagaaggagactctgaattcttacaacctctctacgccaaagaaatccagtcccgaccaggtaatgccctgtacttcaagtctgccagaaatgttacagtgaacattctcaatgaccagactaaagtgctaactcagcttataacaggtccaaaagccgtagaagcttatggtaaaaaatttgaggtaaaaactgtttctggaaaattgctcttctctgcagacaataatgaagtggtagtaggagctgaaagattacgagttttaggagcggagggcacagtgttccctaaatctatagaaacacctaatgtcagggcagaccccttcaaagaactaaggttggagtccccaacccggtctctagtgatggaggccccaaaaggagtggaaatcaatgcagaagctggcaatatggaagccacctgcaggacagagctgagactggaatccaaagatggagagattaagttagatgctgcgaaaatcaggctacctagactgcctcatggatcctacacgcctacaggaacgaggcagaaggtcttcgagatctgcgtctgcgccaatgggagattattcctgtctcaggcaggagctgggtccacttgtcagataaacacaagtgtctgcctctgaaagactatccatagtggacattgttggcagcataaaggccttttttggctttagacactggctgccagctatttttactagaacacagaaagcctatcaaagaccttgtgtgtatgtgtacgtgtgtgtgcgtgcttgagtgtgttcgcgtgtgtgggtggatataaatatatataaatatatataaataaatatatatatcctctgtataaaatgaggtttcagtacaaaaggaaccatgggtgaccctgcgatatccactgtcattttccatcccatccccaccacctgagtgacagaaatctaaacacacatccgtcccaacattccccagaccattcagaatcacacagcgtattaaacactgacagaatcttcatctagatattcgagtagcagcatatcttctcttttagtgtcattacgagggagtgatggcgggaatctcagtcgcactcaagctctgagacctttgtatcaaaaataggcatttgatttcctgttttagctttagtaaggctggctaacttccccctcttcaagctaggaactggcaatgctgtagaagtcagccgtaggaattcaaaatggctggcctaccttggctaccagacatattggggtttttgtagttgaatgaatgaggaggatgaatttcagcaaattttgaactgctcacccaacttctgctatcttgctccctccaaactcacagattctcctacagtcaaattaggagctgtaaatcagcacaaaataagataacagctgttcctcagtgagctggaagctacttaatggcctgatgggcaatgaacaaacgggtgatatgtctctgtttaagggaaaaatggcttaaaagctgttctgttctcacttctgactttaaccaaaagatttcaacccacaatgatcaggtcaatcaaaatccctaagagcagaactcctaccccaaaagaagcctggaagtctaattaagagtagcataaggaacctaattatgtttaccatgtttcttgggattggtgggaaatgtcaaaacatgccctttatttttaaaggcattcacaaactctctgactttgttcttcttatatattttttcagtgccgggatattcatattcctaaagccactattgtgttttctctaagaagcactacatgccaccagaattgtgcactgaaagataatacaaactgagtgtctttatgagaatcactgtgtcccctgaggcccagcagtacctgcttccctgtatgtggaagcagcacctcattcccgccatcagctacctctcatcaccccaccttcatcatcatgctccagggtcaccctggccagctcttgtgctgggacaggggattacaccatctctgttcaaagagggggaaatgtgcctatgccttaagtcaatgcactcagcaaggagaagcacatcttatttatcttgttacctatagtttactttgggtgattggaggggaatgacttagttatgactggacatcttaaaagctgatagacaagccaaatggctggcagatgatgtggatttcaaagagcccagaatgaactcatcactggcttagacagtcctggatgccatttggaaagtagtggccctgcaagcctaaatgaagtagtatttgtaggcctgggtggcatttggatttttcttttccctcaacaaggttttactttttcttactttacaagcaagggaagttttgtgataggagagaaataaaagatttgatattttttgagatgacactcaagcatcaggctgagatttgcacacatgggatgtaaaagcaagctgtgtgttgcttagtcacttacttagaagtagatggtgggggacagcggcgtgggtcctagcctggccagtgatgctgctggcgtccagaccccagactcactccaagcactcttgttcaatatctcatgcagaagagttgggctggtcactcttaggggtgagaccccgtgattggttggtttgtagcactaaggtctaaaaaggaaaaccataaaagacatcagattacgctggatcagtataattaatattccatagggccatgttgccagaatctgtatgtatcaatacagggtttttccaagccaggaaacgccctccttggctactaggagcacctatcccatatcattcagataaacaatgatagctacaaagtcatttgtggctagataggttaagacaggtgattttttaaagtagactgtctttgcattttgccatctgaagttcattaatctttagatgacaaaaaagcaaaaagttcccagaacgtttttgcttagattttgttctaatcaccacgtgaaggaatgagattagcaccacaagtttcatgccaataaaagagactggtgtgatcccacatgcaaaatttaatcctaagggtagtgagatcacaaacagaataaaaataagagcaatcaaccatataaatcaagtacctattgggaacagacataacattcaatttttcatttatgctaagtgaccacagtatacaaagtaataagcaggaaatttgatatgggttaaattatgcattttgttcagattttggaaattggtatgcattataagtttctcaatgtacatctttttatcccaacaccctcaaactagaatatttgtcagtggtcaagagaaaaaattttacctgaattcttgggggccggcggggagcttttacattaaaaatctactaacgcctactttttaaaaaatgagattctttctaatctttatatatgacattttctagacaatcgcacctttgggtatattaaacagctggtatcataacaaagaatccaaatgaaccttcaatatactagaagttctagtaggttaatattgttcagaagatttttacaaattaaaaactgatttccaaatatgttcaacatttacttctatttgatatctgctcaagaagtcatagaagtcttgggaaactattcgagtatcacagaggttttcaaaagcccttatggtgacatctacctaggtaaaagcctgacatgtggctttataattgttatgttacccaagggataaacttgaactggctttgaacatcctttaggtcattttctctttggataattttcatcgcatatccggcaactatagaccaaagtttgcttaaggtttgaccctagagcagaggtgggcaaactatgacctggaaaccaaatctgacttaccaccttttcctgtagttaaagttttattgtcacatagccacatacattcatttacatgttttctgattttacactacagcagcaggatggagtagttgtgtcagagactatgtatcccacaaagcatagattacttactatttagtcctttacaggcaaagtttcctcacccctgacctagaggtttttgtggtatgcattggatatagcaggaaagaaagcacatttccaaacagcagggagtaagcttacatttctgtgtaggtttgggaatatagttacttggcaaagtctttcaggaaggaagcccttccttatgttacatgtggaaagcctgccttccaagacatgtggaagtaattgatccacctgccagagaaacacaggctcagaggatgcctgggaacagggaggatgggattagtggaagcttaatggaaaaggaaagttatgatcctccaagacccttaattgatagaccataccaggttctgcaggtcagcatcattgtgtaatgagagtgaagtaggggaccctgtggttcaaccttagaatctgtttcctgtaggctctttctgctgtctatattcattaaagttttccacttcaccctcccatagtctagagggatgcccattccatggtcctccagagaatagttttgacttaacatgtctgtttagcccacatcacgtcagttatcaacaccgccactgtgcttactgttcctacagccacaccaggcttgaagagttagtgagaccaacaaataattggaagtattggaaaaagcaaaatacatggggacaaaaaaaatacagtgaaattctttttatcaaactgatgctgtgagaaaccagatgaatgccagtttggctttatttctaagaatctgggtcttcattctctggtgtagaaggaatgcaaaaaactataacaacaacaacaaaaacatattttgaaaagacatattctgacatctctgcttgtgtgtggtaaggcaggttcctatcagacatttatccctttggtcaagatcccttttgctcatccagggtttcatactcaatatcgcttaaaaaaaaaaaagtatcagctagggatgactctggaagtatgagtatcatggtggggaggaaggaattttttttaaatgtaaatgacccccatttaccagaccctaatcaaagtcacttaagggaatccctcagccttttatttggaaacagttgaaataaactggcagcagctagatcagagtatcttgctttattttataaaggccaaaggtagtatgaagtttggaccaaaaaggtaaatagatccattccagcacctgatactgatttttcaaggctctatgaaaggtcaaaaatttcattaaacaagaccagttctccctcttccccctgtcccaagaaatcttaggcatgaaaaggataaggaaacagctcctggaatgatacatttgcatagtgccctagtagcaggttgggaaaaagttataatataagaaacaaccttcgaaaacaggccttttatctcaaagataaaatgtctttcttgtggtctttcatcactatctccgtggtggaaggttcccctagttccaacatatttccattaaaatagtcaaagccacggcattgggatgtcagatgcctctctttctttgtggtaatcggaatttaaaattatacagttgcctctgaatttctcatgcacaaagccaaaccactgataagagataaagcagtctgaagcctgctgcttcagccagcacagcacaccacacacgctcgcactttcaaaagcaatgtgatttctatggttcttaaaagctttcttcataagggagtccctgaaatttctcaaggcaggtttgaatggcaaagggaaaataattacttgtgggaggtcctccttttgagtattgttagagcatacatgtaaaagaaaataacctttttggggcaactcatgctcacacatgctgttttctttggttctccccctaccttccttttgtagatattgacagaataggaggaaatgagcatccttatttgagaaagagcaagaatgtcatgagcccttgatgcaatagtaagtgtgatgtcatcatacagtgttaatgatgctatcaaatccatcaataaacagtctcaaaccttccaacaacagtgctcactgctgctcctcaacttcagcccagcaagcagtaatatcatcacccattttgagatatgcaggtggaatagaacaaagaaacagccactgtaatcgagaagcatgtttactgtctaaatccacctgttgcagtaggaagccagagtggggttccaaatgcctcattaagtatgtggacagcctcactagtaagtgagtgaatttggcttcatcactgaacattagctaaggtcagcttaataacacaaatatgaggccgacttctttgcgagaagagaaaagaaaacatctgcttgatttaaaatccaccccacatgcctagagttgtctaatagtccctcactttccaatggcttcacatcctacttctacatttggggttttttggtgaaatcagagatagctcaggatttcataaaacgagaaactccaaactggtctattaggttccatgggaacacttgtagccaaaggattgtctgagggcaggaagacgacacttgtcaacaaggaagacagtgtttctttagttcccatattcatctaattcatggggttctaacattttggggggccatagattcttttgacaatctgagccaatctatgaaacttctccccaaaaagaaccaccccacaaaatcttgcaaaacgtaagagattttcctggatctgaagctacccgaagacatgggaagagttgtattctattattcaattttaagaatatttattaatattcactgagctattgctagccactgtgctaaacattttacatacattctcctatttcatcctcaaaacaatcctttgagttgggttttaatatagttccaatattcggatgtgaaaactgaggcttatagtggctaagaaacttgcccaaagccactacctagaaaatggcagagctggaatgtaggtttaactcctgaccactatgctataaagtcaccacatgtcaaactaattttcaagttgttgggacatgtcccctactaggttttaaactagatcttccttggtagatgaagctatagaacttctattttccctgctttctgtagtctctcacagtgacagcatctatactaaagtatagatacctaaggggaaaatatagaaagcctgcctgaataatagaatctagaacaacaacaaaaatattaattttttctgtgtatgcttaggtcaagcttaaaaaaaaaaaaaaaa

SEQ ID NO: 30 - DNA, 5561 bp, Homo sapiens
aaagcagcagagacgctgcagagggcttttcttagacatcaactgcagacggctggcaggatagaagcagcggctcacttggactttttcaccagggaaatcagagacaatgatggggctcttccccagaactacaggggctctggccatcttcgtggtggtcatattggttcatggagaattgcgaatagagactaaaggtcaatatgatgaagaagagatgactatgcaacaagctaaaagaaggcaaaaacgtgaatgggtgaaatttgccaaaccctgcagagaaggagaagataactcaaaaagaaacccaattgccaagattacttcagattaccaagcaacccagaaaatcacctaccgaatctctggagtgggaatcgatcagccgccttttggaatctttgttgttgacaaaaacactggagatattaacataacagctatagtcgaccgggaggaaactccaagcttcctgatcacatgtcgggctctaaatgcccaaggactagatgtagagaaaccacttatactaacggttaaaattttggatattaatgataatcctccagtattttcacaacaaattttcatgggtgaaattgaagaaaatagtgcctcaaactcactggtgatgatactaaatgccacagatgcagatgaaccaaaccacttgaattctaaaattgccttcaaaattgtctctcaggaaccagcaggcacacccatgttcctcctaagcagaaacactggggaagtccgtactttgaccaattctcttgaccgagagcaagctagcagctatcgtctggttgtgagtggtgcagacaaagatggagaaggactatcaactcaatgtgaatgtaatattaaagtgaaagatgtcaacgataacttcccaatgtttagagactctcagtattcagcacgtattgaagaaaatattttaagttctgaattacttcgatttcaagtaacagatttggatgaagagtacacagataattggcttgcagtatatttctttacctctgggaatgaaggaaattggtttgaaatacaaactgatcctagaactaatgaaggcatcctgaaagtggtgaaggctctagattatgaacaactacaaagcgtgaaacttagtattgctgtcaaaaacaaagctgaatttcaccaatcagttatctctcgataccgagttcagtcaaccccagtcacaattcaggtaataaatgtaagagaaggaattgcattccgtcctgcttccaagacatttactgtgcaaaaaggcataagtagcaaaaaattggtggattatatcctgggaacatatcaagccatcgatgaggacactaacaaagctgcctcaaatgtcaaatatgtcatgggacgtaacgatggtggatacctaatgattgattcaaaaactgctgaaatcaaatttgtcaaaaatatgaaccgagattctactttcatagttaacaaaacaatcacagctgaggttctggccatagatgaatacacgggtaaaacttctacaggcacggtatatgttagagtacccgatttcaatgacaattgtccaacagctgtcctcgaaaaagatgcagtttgcagttcttcaccttccgtggttgtctccgctagaacactgaataatagatacactggcccctatacatttgcactggaagatcaacctgtaaagttgcctgccgtatggagtatcacaaccctcaatgctacctcggccctcctcagagcccaggaacagatacctcctggagtataccacatctccctggtacttacagacagtcagaacaatcggtgtgagatgccacgcagcttgacactggaagtctgtcagtgtgacaacaggggcatctgtggaacttcttacccaaccacaagccctgggaccaggtatggcaggccgcactcagggaggctggggcctgccgccatcggcctgctgctccttggtctcctgctgctgctgttggccccccttctgctgttgacctgtgactgtggggcaggttctactgggggagtgacaggtggttttatcccagttcctgatggctcagaaggaacaattcatcagtggggaattgaaggagcccatcctgaagacaaggaaatcacaaatatttgtgtgcctcctgtaacagccaatggagccgatttcatggaaagttctgaagtttgtacaaatacgtatgccagaggcacagcggtggaaggcacttcaggaatggaaatgaccactaagcttggagcagccactgaatctggaggtgctgcaggctttgcaacagggacagtgtcaggagctgcttcaggattcggagcagccactggagttggcatctgttcctcagggcagtctggaaccatgagaacaaggcattccactggaggaaccaataaggactacgctgatggggcgataagcatgaattttctggactcctacttttctcagaaagcatttgcctgtgcggaggaagacgatggccaggaagcaaatgactgcttgttgatctatgataatgaaggcgcagatgccactggttctcctgtgggctccgtgggttgttgcagttttattgctgatgacctggatgacagcttcttggactcacttggacccaaatttaaaaaacttgcagagataagccttggtgttgatggtgaaggcaaagaagttcagccaccctctaaagacagcggttatgggattgaatcctgtggccatcccatagaagtccagcagacaggatttgttaagtgccagactttgtcaggaagtcaaggagcttctgctttgtccacctctgggtctgtccagccagctgtttccatccctgaccctctgcagcatggtaactatttagtaacggagacttactcggcttctggttccctcgtgcaaccttccactgcaggctttgatccacttctcacacaaaatgtgatagtgacagaaagggtgatctgtcccatttccagtgttcctggcaacctagctggcccaacgcagctacgagggtcacatactatgctctgtacagaggatccttgctcccgtctaatatgaccagaatgagctggaataccacactgaccaaatctggatctttggactaaagtattcaaaatagcatagcaaagctcactgtattgggctaataatttggcacttattagcttctctcataaactgatcacgattataaattaaatgtttgggttcataccccaaaagcaatatgttgtcactcctaattctcaagtactattcaaattgtagtaaatcttaaagtttttcaaaaccctaaaatcatattcgccaggaaattttcctaaacattcttaagcttctatttttcccctgccaaaggaaggtgtttatcattttaaaatgcaatgtgatttagtggattaagcaggagcgctggttcttgtctccattgccttttcttatatcattgataatgatgtaagaatcacaaggggccgggcgcggtggctcacgcctgtaatcccagcactttgggaggccgaggcaggtggatcatgaggtcaggagatcgagaccatcctggctaacaaggtgaaaccccgtctctactaaaaatacaaaaaattagccgggcgcagtggcgggcgcctgtagtcccagctactcgggaggctgaggcaggagaatggcatgaacccgggaagcggagcttgcagtgagccgagattgcgccactgcagtccgcagtccggcctgggcgacagagcgagactccgtctcaaaaaaaaaaaaaaaaaaagaatcacaaggtatttgctaaagcattttgagctgcttggaaaaagggaagtagttgcagtagagtttcttccatcttcttggtgctgggaagccatatatgtgtcttttactcaagctaaggggtataagcttatgtgttgaatttgctacatctatatttcacatattctcacaataagagaattttgaaatagaaatatcatagaacatttaagaaagtttagtataaataatattttgtgtgttttaatccctttgaagggatctatccaaagaaaatattttacactgagctccttcctacacgtctcagtaacagatcctgtgttagtctttgaaaatagctcattttttaaatgtcagtgagtagatgtagcatacatatgatgtataatgacgtgtattatgttaacaatgtctgcagattttgtaggaatacaaaacatggccttttttataagcaaaacgggccaatgactagaataacacatagggcaatctgtgaatatgtattataagcagcattccagaaaagtagttggtgaaataattttcaagtcaaaaagggatatggaaagggaattatgagtaacctctattttttaagccttgcttttaaattaaacagctacagccatttaagccttgaggataataaagcttgagagtaataatgttaggttagcaaaggtttagatgtatcacttcatgcatgctaccatgatagtaatgcagctcttcgagtcatttctggtcattcaagatattcacccttttgcccatagaaagcaccctacctcacctgcttactgacattgtcttagctgatcacaagatcattatcagcctccattattccttactgtatataaaatacagagttttatattttcctttcttcgtttttcaccatattcaaaacctaaatttgtttttgcagatggaatgcaaagtaatcaagtgtttgtgctttcacctagaagggtgtggtcctgaaggaaagaggtcccctaaatatcccccaccctggtgctcctccctctccctggtaccctgactaccaggaagtcaggtgctagagcagctggagaagtgcaggcagcctgtgcttccacagatgggggtgctgctgcaacaaggctttcaatgtgcccatcttaggtgggagaagctagatcctgtgcagcagcctggtaagtcctgaggaggttccattgctcttcctgctgctgtcctttgcttctcaacggtggctcgctctacagtctagagcacatgcagctaacttgtgcctctgcttatgcatgagggttaaattaacaaccataaccttcatttgaagttcaaaggtgtattcaggatcctcaaagcattttaaccttgccgcttaaaacccaatttaccgtgaaatgggaattttgctgcattgttaaactgtagtggaaaccatgctatagtaataaaggttatataagagagaaattgaaattaaatgtgtttttaaatttcaaaaaaaaatcaatctttaggatgacttaaaaattgatttgccatgtaaaatgtatctgcattttttacacaaaacttgttttaagcataaaattttaaaactgtactacttgatgtattatacattttgaaccatatgtattaaaccataaacagtataatgttgttataataaaacaggcaataaatttataaataaaagctgaaaaaaaaaaaa

SEQ ID NO: 31 - DNA, 2530 bp, Homo sapiens
ccgtgcagtccgagatgggctcgtctcgggcaccctggatggggcgtgtgggtgggcacgggatgttggcactgctgctggctggtctcctcctgccagggaccttggctaagagcattggcaccttctcagacccctgtaaggaccccacgcgtatcacctcccctaacgacccctgcctcactgggaagggtgactccagcggcttcagtagctacagtggctccagcagttctggcagctccatttccagtgccagaagctctggtggtggctccagtggtagctccagcggatccagcattgcccagggtggttctgcaggatcttttaagccaggaacggggtattcccaggtcagctactcctccggatctggctctagtctacaaggtgcatccggttcctcccagctggggagcagcagctctcactcgggaagcagcggctctcactcgggaagcagcagctctcattcgagcagcagcagcagctttcagttcagcagcagcagcttccaagtagggaatggctctgctctgccaaccaatgacaactcttaccgcggaatactaaacccttcccagcctggacaaagctcttcctcttcccaaacctctggggtatccagcagtggccaaagcgtcagctccaaccagcgtccctgtagttcggacatccccgactctccctgcagtggagggcccatcgtctcgcactctggcccctacatccccagctcccactctgtgtcagggggtcagaggcctgtggtggtggtggtggaccagcacggttctggtgcccctggagtggttcaaggtcccccctgtagcaatggtggccttccaggcaagccctgtcccccaatcacctctgtagacaaatcctatggtggctacgaggtggtgggtggctcctctgacagttatctggttccaggcatgacctacagtaagggtaaaatctatcctgtgggctacttcaccaaagagaaccctgtgaaaggctctccaggggtcccttcctttgcagctgggccccccatctctgagggcaaatacttctccagcaaccccatcatccccagccagtcggcagcttcctcggccattgcattccagccagtggggactggtggggtccagctctgtggaggcggctccacgggctccaagggaccctgctctccctccagttctcgagtccccagcagttctagcatttccagcagctccggttcaccctaccatccctgcggcagtgcttcccagagcccctgctccccaccaggcaccggctccttcagcagcagctccagttcccaatcgagtggcaaaatcatccttcagccttgtggcagcaagtccagctcttctggtcacccttgcatgtctgtctcctccttgacactgactgggggccccgatggctctccccatcctgatccctccgctggtgccaagccctgtggctccagcagtgctggaaagatcccctgccgctccatccggatatcctagcccaagtgaagcctctggggccccagctagctgaccctgaagttttcctaccccaaggagagttactcgacagtccataagtcaactgttgtgtgtgtgcatgccttgggcacaaacaagcacatacactatatcccatatgggagaaggccagtgcccaggcatagggttagctcagtttccctccttcccaaaagagtggttctgctttctctactaccctaaggttgcagactctctcttatcaccccttcctccttcctcttctcaaaatggtagattcaaagctcctctcttgattctctcctactgtttaaattcccattccaccacagtgcccctcagccagatcaccaccccttacaattccctctactgtgttgaaatggtccattgagtaacacccccatcaccttctcaactgggaaacccctgaaatgctctcagagcacctctgacgcctgaagaagttataccttcctcttcccctttaccaaataaagcaaagtcaaaccatcatctggaaacagtggccacttttcactgacctctcttcgacatctagtcaacccacccaatatgccactgggtttcgctcccaattccaccccaccctccattacagagctcaccacgccctcctagatcaccgtccccaacacacccattgcctctcaaggcccttatctcagccccttcctgtggccatttccctcagtgcccagatgattccctgggtgagggagacactggggcaccctcagaggttggagcaggctccctgctgtccctggatcctggacagatggctcagtaaactgtgggactaggtgcagacttttgccttcttggagtcctgggtctcctctgagaggtctgggtggtgctcctcctacgcctctagaggtctctgtgttcctcattttccttcaaaagcgggctgtatttctcttctaccttccagctcctcccacagaggaggaagacaataaatatttgttgaactg

SEQ ID NO: 32 - DNA, 1396 bp, Homo sapiens
tcctttccgcttccggtgtcccctacagtcatggctgccgccgtcgctgctgccggtgcaggggaaccccagtccccggacgaattgctcccgaaaggcgacgcggagaagcctgaggaggagctggaggaggacgacgatgaggagctagatgagaccctgtcggagagactatggggcctgacggagatgtttccggagagggtccggtccgcggccggagccacttttgatctttccctctttgtggctcagaaaatgtacaggttttccagggcagccttgtggattgggaccacttcctttatgatcctggttcttcccgttgtctttgagacggagaagttgcaaatggagcaacagcagcaactgcagcagcggcagatacttctaggacctaacacagggctctcaggaggaatgccaggggctctaccctcacttcctggaaagatctagattgttattgctgtttgagctgtctcagtgggataagtttgaaattcaagtgtttgaactgctgataatttggatttttttttttttttaactttggcacattgatctatctaaacctggtggggagaattatccccacattgtctcatggaaagactcaacttgcaactgtgccctccacactatccttacttctgtctccactctgataccagagtgcagccatgcagatggttattccagctctggtcacccgactcctttcaccaaattgctcctaactggaagatctcactttccccttgtggggtaggaaccgatgccagtgggagggatgtgcccctgaccattaacgactgttttttttttttttttttaaagaatggagttgttggggcaggacatgcacacaatgtgaaacagacaaaatgcattacacctgtagtgtaaagtggccactatgaatccctatgtatgagaggagggaggcaggctgcagcttcagccacagaatggggactatggaagacagcaggagctcatttcctctgcacattttggctgttagacctgtgtgtgtgtttaaaaaaagagaagtcagtgctcactttttgtatttaaatattaaaaatgattccaactgaaagtgtcatcctaagtaccttgaaatgagaccacgtcagagacatgtactgcccctcacattttctcacctaaaccagcagcacctccatcttaacagccataggcccaaattgtttccaagtgaaaattcatttttagccaagtacttcatagcaatctttgccctgaatttaggcagtcactttgagatccatcagcctaaaacaaaggattgggtctatgtacttctttagtctataatgacactgtgtaattataaagtatttgtagggaaaaaaaaaaaaaaaaaaaa

SEQ ID NO: 33 - DNA, 9252 bp, Homo sapiens
ggcctgggcgcgtccctgcagcgtggcgggacggccccgttccagtcacccccgcctcgctgcggtggcctcgggcctgggcgcccgccttcagctgcggcggagctggctctgtaaatgccggtgcccgcgagccctcctgaatgcttgtctgcgcccgacgagcgcggcctgtcccgaagctgtccactgccaccactcgggcagtgcttgctttagcctggccctttgcagctgaaaggcgtgacatggtgtcgggtggttcgtgggaagtcggggtttcaggagtccgtgtacttccttgtttgtctttgtcgctggccgacttgtcttcattccaggtggccagagcgagtggggccgggcgttgtcacgggtatcatgatattagctggtttgacatcaagtcatttgtgagtcatcagatcttctcctgaaaatgggagacacagtagggcccctcccaggagctcttggctgttgctgatggcagaagccaagcttgtccaaggttcacttgtagcccctcagcgtcagctcagctggtgtcgtcctgaccatggacggcgcgtcggccgagcaagatggcctccaggaggacagatcccacagtggcccctcgtctctccccgaggccccactgaagcccccgggcccactggtgccacctgaccagcaggacaaagtccagtgtgccgaggtaaacagagcatccacggaaggggaaagcccggatggacctggccagggaggcctctgtcagaacgggccaacgccacccttcccagaccctccgtcgtctctcgatcccaccacaagcccagtgggccctgatgcctctccaggtgtggctggtttccatgacaacctaaggaagtctcagggaactagtgctgagggcagtgttagaaaagaagctttgcagtctctcagactcagtcttcctatgcaagaaacgcaactgtgctctacagattctcccctgcccctggagaaggaggagcaggtccgacttcaggctcggaagtggctggaagagcagctcaaacagtacagggtgaagcgccagcaggagaggtccagtcaacctgcaaccaaaacgagactttttagcacgcttgatcctgagctcatgttaaacccagaaaacttaccaagggccagtaccctggctatgacaaaagaatattccttcctgcgcaccagtgtccctcgggggcctaaggtgggcagcctggggcttccggcacatcctagggagaaaaaaacttccaaatcaagcaaaatccggtctctggccgattacagaactgaagattcaaatgcggggaattctgggggaaatgtcccggctcccgattctaccaagggttccctgaagcagaacagaagcagtgcggcgtccgttgtgtctgagatcagcctgtcccccgacactgacgaccgtctggagaacacctccctggctggagacagcgtgtctgaggtggatggaaatgacagcgacagctcatcgtacagcagcgcctccacccgagggacctatggcattctgtcgaagacagtgggcacgcaggacaccccctatatggtcaacggccaggagattcctgcggataccctgggccagttcccctccattaaggacgtcctccaggccgcagccgctgagcaccaagaccaggggcaggaggtcaacggggaggtgcggagtcggagagacagcatctgcagcagcgtgtccttggagagctctgcagcagaaacacaggaggagatgctgcaggtgctcaaagagaaaatgcgactcgaaggacagctggaagccttgtcactggaggcgagtcaggcacttaaagagaaggctgagctgcaggcccagctggccgccctcagcacgaagctgcaggcgcaggtggagtgcagccacagcagccagcagcggcaggattcgctgagctcggaggtggacaccctgaagcagtcgtgctgggacctggagcgagccatgactgacctgcagaacatgctggaggcaaaaaatgccagcctggcgtcgtccaacaacgacttgcaggtggccgaggagcagtaccagaggcttatggccaaggtagaggacatgcagaggagcatgctcagcaaggacaacacagtgcacgacctgcgacagcagatgacagccttgcagagccagcttcagcaggtgcagctggagcggacgacgctgaccagcaagctgaaggcgtcgcaggcggagatctcgtccctgcagagtgtccggcagtggtaccagcagcagctcgccctggcacaggaggcccgcgtcaggctgcagggtgagatggcccacatccaggttggacagatgacccaggcaggtctcctggagcacctgaaactcgagaatgtgtccctgtcccagcagctgacggaaactcagcacaggtccatgaaggagaaggggcgcatcgcggcacagctgcagggcattgaggctgacatgttggatcaggaagcagccttcatgcagattcaggaggcaaagacgatggtggaggaggaccttcagaggaggctggaagagtttgaaggtgagagggagcggctgcagaggatggcggactcggcggcatccctggagcagcagctggagcaggtgaagttgactttactccagcgagaccagcagcttgaggctttgcagcaggagcacctggacctgatgaaacagctcaccttgactcaggaggctctgcagagcagggagcagtccctcgatgccctgcagacacactacgatgagctgcaggccaggctgggggagctgcagggcgaggccgcctccagggaggacacgatctgcctcctgcagaacgagaagatcatcttggaggcggctttgcaggcggccaagagtggcaaggaggagcttgacagaggagcaagacgcttggaagaaggtaccgaggaaacgtcggaaactttagagaagttaagagaagaattagctatcaaatccggccaggtggaacacctgcagcaggagactgctgctctgaaaaagcaaatgcaaaaaataaaggaacagtttctccaacaaaaggtgatggtggaggcctaccggcgcgacgccacctccaaagaccagctcatcagtgagctgaaagccaccaggaagaggctggactcggagctgaaggagctgcggcaggagctgatgcaagtgcacggggagaagcggactgccgaggcggagctctcgcgcctgcacagagaggtggcccaggtccgtcagcacatggcggaccttgaagggcatctccagtcggcgcagaaggagcgagacgagatggaaacacacttgcagtcgttgcagttcgataaggagcagatggtcgcggtcacagaggccaatgaggcgctgaagaaacaaatcgaagagttgcagcaagaggcccggaaggccatcacggaacagaagcagaagatgaggcggctgggctcagacttgaccagcgcccagaaggagatgaagaccaaacataaggcctacgagaacgccgtgggcatcctcagccgccgcctgcaggaggccctcgcggccaaggaggctgcggacgcggagctgggccagctccgagcccagggtggcagcagtgacagcagcctggctctacatgaaaggatccaggccctggaggcggagctgcaggctgtcagtcatagcaagacgctgctggaaaaggaactgcaggaggtcatagcgctgaccagccaggagctggaggagtcccgggagaaggtgctggagctggaggacgagcttcaagaatccagaggctttaggaagaagataaaacgccttgaggagtcaaacaagaagttggctcttgaattagagcacgagaaagggaagcttacgggcctcggtcagtccaacgcagctctgcgggaacacaacagcatcctagaaacagctttggccaagagggaggcagacctagtccagttgaaccttcaggtgcaggcagttttgcagcgcaaagaagaggaggatcgccagatgaagcatcttgtccaggccctgcaggcctcactagagaaggagaaggagaaggtgaacagcctcaaggagcaggtggctgctgccaaggtggaagccgggcataaccgccgccacttcaaggcggcctccttggagctgagtgaggtgaagaaggagctgcaggccaaggaacacctggtgcagaagctgcaggccgaggccgacgaccttcagattcgggaggggaaacattcccaggagatagcacagttccaagcagagctggccgaggcccgggcacagctccagctcctgcagaagcagctggacgagcagctcagcaaacagcccgtgggaaaccaagagatggaaaatctcaaatgggaggtggatcagaaagaaagagaaatccagtccttgaagcagcagctggacttgacggagcagcagggcaggaaggaactggaagggctacagcagctgctgcagaacgtcaagtctgagttggagatggcccaggaagacctgtccatgacccagaaggataaatttatgctccaggcaaaagtgtcggagctgaagaacaacatgaagaccctgctccagcagaaccagcagctcaagctggacctacgccgcggcgcggccaagacgagaaaggagccgaaaggcgaggccagctcttccaaccctgccacgcccatcaagatcccggactgcccagttcccgcctcgctgctggaggagctgctgagaccaccgcccgccgtgagcaaggagcccctcaagaacctgaacagctgcctccagcagctcaagcaggagatggacagcctgcagcgccagatggaggagcacgccctgacggtgcacgagtctctgtcctcgtggacgccgctggagccagccactgccagccctgtgcccccggggggtcacgccggcccacgcggcgacccacagagacacagtcagagcagggcttccaaagaagggccgggagagtgactgctgtggactcgcctccgtgcgccgctgccccagaaggctcttatcaatgttatttatttgattgtgtggtcgatgtttttctaagacatgaaatttaagttttgttttgcctttaacaagaagtaaaatatatagcagaatgagagccaaggactagaaaaacattcgaagatcacaattagcttttcacatggaatgaccaactcttaaaagcctgataggctctcggcgaggagctttgaacgtgtctgaagggttacttgtaggtcgtggcttctgagcggccaccgatgctgctctctgcgggtgacagggagaggctgcgtaactgggagcagctgtgtgacagggtctgcggcaccgcgcctggccaggccggctgcagtttctcacttccctgttccattcagtaagagctttacttttccgcagaaatgaaattttatctgtacctttggctttttacttgtttttttggatagccatcccaccataggatgtgtacatagatactgaatatcataatccaatctttgttttttttttttttttttttttgagacagagtctcgctttgttgcccaggctggagtgcagtggcacactctccgctcactgcaagctccgcctcccaggttcatgcgattctcctgcctcagcctctcgagtagctgggattacaggcgtgcgccactatgccaggctaatgtttgtatttttagtagcaatggggtttcaccatgttggccaggatggtctcgatctcctgacctcaagtgatctgcccatctcagcctcccaaagtgctgggattacaggcgtgagcccctgcgcccggcctgtcacccagtctttaagaagcatatgctcatgttattgaagaagaacctacttattattgattgccttttgaaaatttgttgggaataatttacctgcaggatttagggatagtcagaaaattctaagaaatataattattttatttaccttctaaagccaaatattcttacacagaaaggtcctctgttgttctggttttactttgttgctgaggatctttccttcctgctggtctcttcctctcaggccactggccctgtgtgattccaccgtggctggccactgggaaggggcagcttggacccttggtcaggcctgacggccatcaggaggcacaaggacactgaggccccatatctgatctgacctttgggggggcacagggagaggccggtggaggaggaggaggagagcagaccaggggctccctgcagcgactcccgcggtttcccctggagtcagccaggtgtaggtcgcaggcggtaacaaacctcacactcctgttccccaagtgaaaatctttaccattgtctgtgggagcgcctgtactcgtgtgtaggagcacctgtacttctgcagtcatcgagaagtcctggatcttttgtggttacaccagcatcatgtggcaagcagaggcgacttccggaagagacaggcaggcaccgtgaggaaggtggctgtgctctcccaggtgtctcagagacagatgccttatttaaaatcagcacgacatgtgtgagatcttctgtttcctaccccaaatcctgaaaccctgcagacactggctgactgggagaggtggggtctgtaagttgtcccctagtttgctaagaaaatctaaaataatatttattatatgagttaggagagagagaatgggtccgcgtggcctcctctgcagatgtactggtctgaaatgaggttctgagtcactggccaggccagatgtgctcatgtcggtgtctggtgtctgttttgtggagaaaacagtatggtgtgttttaagctatttgtgttctgttgtaatatacttttagaaggttaattggtaaggttaaggtagcattaaccacaaagatgtttggtatttaaaaaatattctctagcaaatattggaatttccaaaatatatcatttgtacagggttaattttgaaataatacttgaaaatttcattataaatatatcctactttttatcttaagttgaagatgttatttactaaattgttcttgtaccattagaaaaaaaaatacggcaatttacgttcttatttattttggctgtactacccctttgttttaattttaaaatcaagaaatcgggccgggcgcggtggctcatgcctgtaatcccagcactttgggaggccgaggcgggtggatcacctgaggtcaagaggtccagaccatcctggccaacatggcaaaaccccgtctttactaaacatacaaaaattagccgggtgtcgtagtgcgcacctataatcccagctacttgggaggctgaggcaggagaatcacttgaacccaggaggcggagcttgcagtgagccgagatcgcgccactgccctccagcctgggcaacagagcgagactccgtctcaaaaataaataaatgattttaaaaaatctaaaatcgagaaatcacacattcagtggggagcgacttctccttgcttatgggaagtcctcaagtgagtgatgttcaccatgtatttttttttctcttaggacagactaattctgaaaataccgaaggaaaagtagctctatgttctcaccccggttttcctgcgtgtgtgcccttgggtgcgatgcctcccccagcgctctgtggtcgccggtgccagggccccctctggtttggcagggcctggctgcctttgctccctgcagtgagtcttttggtgttttcatgcacggcttgtgcttctggatctgaggcctctcgtgttcacgcggacacttccttccttaagaagacgcctaaaagaggaagttggaattttttttttttttttttgagacagagtctcgctctgtcgcccaggctggagtgcagtggcgtgatctctgctcactgcaagctccgccatctgggttcaagcgattctcctgcctcattctccccagtagctgggattacaggtgcccgccaccacaccagcctaatttttgtatttttagaggggtggagttccaccatgttggccaggctggtcttgaactcttgacctcaggtgatcctgagcctcagcctcccaaagtgctggaattataggcgtgaaccaccgcccccggctgcagttggatttttaaattgcttttttttattgttgaggtttttttatctccaagggactctcccggcacttctaccttccagagttacttcagtgcataaagtttgaattattttgttcttgtgggcagaagtgggaatgatggaatatcctcacggaaaaggcagtgaagttgggagtactgcttacaaaacagggtcaccagtgcattatgtggcgtgttcatccccacgccgtgtgtcacgggctagggcggcgtgttcatccccacaccgtgtgtcacaacaggctagggcacttcacgatgtcactacttgtttttctgatgttccaaaaacaacgtaacttggttttcatgtgtttttccgtggtatatgtgagattgatgctacgggtcttacggactcacacccgttcccactctctgcaatatggatcaggcagtgtttctgataggatgtgaaatggactctcctcgggtgggtccagcaggggccctgcccaccagaacacagtccgtgctgtgctgcgctaaggagctggccctcaactctccttggtgcagggttcccacaaccgagttctagttccctgaggtctttaaaaacaaaaacagaatgttgtacgtgaagattctaggaggggagggaccagcaaatctgagagaaccgtcctggggcctcccttcgaggagccctctgatgtgaggagggacttgagttgagtgacgctgtggtgtgaggtgttctgagctcactgaccggaaggtccaggtgaatctcgtcataagtgatctcaggctctcacaggatccggagggaaatgtgttagagggtctggaaaattcagtgcttttgagttacttgtttttattaaaaatttcctcacaaaagagagtcctcaagttgtggctgttcttgggaaaggggtcaccgtgtctgacaaagtgtaactttaaaaagcacgttgattttttacaaatgtaagtgtgcttgggaattccttaaattttgtgcaataaactattttttggtaaagattttc

SEQ ID NO: 34 - DNA, 1422 bp, Homo sapiens
ggcaccaggcccgctgctgccgcccgcccggggtgtggagcccggccgctgctcgcgggctgagtgtctgtcgctgctgccgcctccacccagcctccgccatggacctcttcggggacctgccggagcccgagcgctcgccgcgcccggctgccgggaaagaagctcagaaaggacccctgctctttgatgacctccctccggccagcagtactgactcaggatcagggggacctttgctttttgatgatctcccacccgctagcagtggcgattcaggttctcttgccacatcaatatcccagatggtaaagactgaagggaaaggagcaaagagaaaaacctccgaggaagagaagaatggcagtgaagagcttgtggaaaagaaagtttgtaaagcctcttcggtgatctttggtctgaagggctatgtggctgagcggaagggtgagagggaggagatgcaggatgcccacgtcatcctgaacgacatcaccgaggagtgtaggcccccatcgtccctcattactcgggtttcatattttgctgtttttgatggacatggaggaattcgagcctcaaaatttgctgcacagaatttgcatcaaaacttaatcagaaaatttcctaaaggagatgtaatcagtgtagagaaaaccgtgaagagatgccttttggacactttcaagcatactgatgaagagttccttaaacaagcttccagccagaagcctgcctggaaagatgggtccactgccacgtgtgttctggctgtagacaacattctttatattgccaacctcggagatagtcgggcaatcttgtgtcgttataatgaggagagtcaaaaacatgcagccttaagcctcagcaaagagcataatccaactcagtatgaagagcggatgaggatacagaaggctggaggaaacgtcagggatgggcgtgttttgggcgtgctagaggtgtcacgctccattggggacgggcagtacaagcgctgcggtgtcacctctgtgcccgacatcagacgctgccagctgacccccaatgacaggttcattttgttggcctgtgatgggctcttcaaggtctttaccccagaagaagccgtgaacttcatcttgtcctgtctcgaggatgaaaagatccagacccgggaagggaagtccgcagccgacgcccgctacgaagcagcctgcaacaggctggccaacaaggcggtgcagcggggctcggccgacaacgtcactgtgatggtggtgcggatagggcactgaggggtggcgcgcggccaggagcacgcatggtattgacttaaaaggttcattttgtgtgtgtgcacattgtgtgttttgtgtactcctgtgggactcccatggttgtaaataaaggtttctcttttttttcctaaaaaaaaaa

SEQ ID NO: 35 - DNA, 405 bp, Homo sapiens
ggttcctggtcctcgcctcctccgctgtctccctggagttcttgcaagtcggccaggatgtctcaggctgagtttgagaaagctgcagaggaggttaggcaccttaagaccaagccatcggatgaggagatgctgttcatctatggccactacaaacaagcaactgtgggcgacataaatacagaacggcccgggatgttggacttcacgggcaaggccaagtgggatgcctggaatgagctgaaagggacttccaaggaagatgccatgaaagcttacatcaacaaagtagaagagctaaagaaaaaatacgggatatgagagactggatttggttactgtgccatgtgtttatcctaaactgagacaatgccttgtttttttctaataccgtggatggtggaa

SEQ ID NO: 36 - DNA, 1869 bp, Homo sapiens
agcaatggagaatgtcactacaatgaatgagtttcttctacttggcctgactggtgttcaggagctgcagcctttcttctttgggattttcttaatcatttacctgataaacttgattggaaatggatctatattggtgatggttgttttggaaccacaactccactcccctatgtatttttttctgggaaacctttcttgtctggatatttcttattcttcagtgacactgcccaagctgctcgtaaacctcgtgtgcagtcgcagggctatatcttttctaggctgtatcacccagctacacttcttccactttttgggaagcacagaggccattttactggctatcatggcctttgaccgttttgttgccatctgcaatcctcttcgctacactgtcatcatgaacccccaggtgtgtattctgttggcagctgcggcctggctcatcagcttcttttacgctctgatgcattctgtcatgactgcacacctgagtttttgtggctctcagaaactcaatcacttcttctacgatgtcaagccgctcttagaattggcctgtagtgacacattactcaatcaatggcttctttccattgtcacaggcagcatatccatgggagctttctttctgactcttctctcctgcttctatgtaattggcttccttctgtttaagaacaggtcctgcagaatactccacaaggctctgtccacttgtgcctcccattttatggtggtatgtcttttctatggacctgtgggcttcacatatattcgtcctgcttcagccacctccatgattcaggaccggataatggccatcatgtatagcgccgtcacccctgtactgaatccactaatctacacccttaggaacaaagaagtgatgatggctctgaagaaaatctttggtaggaagttgtttaaagactggcagcaacaccactaggactaatgagggatatctgatttctattaagactgatttccatcacttcactgtaagaaatgatttgtttacctggtttatatttttctttcaaaaattttgagcacatattatattaggcagtgtagtaggttcaagaaacacaggagcaagcaaaacaaattccataatgtcatcaaacataaagtttaatgtgatggaggccccaaataaccaaacgcgtaagtacatatgtcaggataattcggtggcaaggagaactaaggaggtaggaagtatggggagggttagagtaggaatctgctgtgtaaaaaagaatgtggcatttctcctaggacaaaaacctttggaattttccaagtaatagaagtatcttactgaaattccatatgagataatctttatttttgcctattttttttccttttgtgtttccttcagcaggaatgtactgatgataatttttctcacaacagtttttatctagaatatcatttttgttaatcttaattcttgaagagaatttttaatgggtatttaattttagggagagatttttctagccattgaaaatatcttgtttttccccagcttattgaagtataattaacaaataaaaattgcatatatttaggcttcacaacatgatgctttagtatatgtatacattgtgaagagactaccacaatcaagctaaacctacattactgtccctgcattagtttactgttgaatactagaagttcttcattctatctaactgcattttcatacccattaagccaatgtgacaagctctttgtttcagttggagtgtttgcacaatttaaatttgataaatttttgatagaattaaatttaaatttatcctccaactaaatttttgatagaattaaatttaaatttgtcctcca

SEQ ID NO: 37 - DNA, 1608 bp, Homo sapiens
tggatgctgggcatcctcgctagatcccctacaaattccccacatacgtaggccaggagcctcagcggtgccccttcaggctcatctggcaagacggtaccagcttgctcagaacaggggctggctattcatcatctcagagcatagagaccctctccttgccacccggcccttcccacctggttggtgacaaatcacaaggtggtagaagttgccagggacagataacatggcagccagcgggaagaccagcaagtccgaaccgaaccatgttatcttcaagaagatctcccgggacaaatcggtgaccatctacctggggaacagagactacatagaccatgtcagccaagtccagcctgtggatggtgtcgtgttggttgatcctgatcttgtgaagggaaagaaagtgtatgtcactctgacctgcgccttccgctatggccaagaggacattgacgtgatcggcttgaccttccgcagggacctgtacttctcccgggtccaggtgtatcctcctgtgggggccgcgagcacccccacaaaactgcaagagagcctgcttaaaaagctggggagcaacacgtacccctttctcctgacgtttcctgactacttgccctgttcagtgatgttgcagccagctccacaagattcagggaagtcctgtggggttgactttgaggtcaaagcattcgccacagacagcaccgatgccgaagaggacaaaatccccaagaagagctccgtgcgattactgatccgcaaagtacagcatgccccacttgagatgggtccccagccccgagctgaggcggcctggcagttcttcatgtctgacaagcccctgcaccttgcggtctctctcaacaaagagatctatttccatggggagcccatccctgtgaccgtgactgtcaccaataacacagagaagaccgtgaagaagattaaagcattcgtggaacaggtggccaatgtggttctctactcgagtgattattacgtcaagcccgtggctatggaggaagcgcaagaaaaagtgccaccaaacagcactttgaccaagacgctgacgctgctgcccttgctggctaacaatcgagaaaggagaggcattgccctggatgggaaaatcaagcacgaggacacaaaccttgcctccagcaccatcattaaggagggcatagaccggaccgtcctgggaatcctggtgtcttaccagatcaaggtgaagctcacagtgtcaggctttctgggagagctcacctccagtgaagtcgccactgaggtcccattccgcctcatgcaccctcagcctgaggacccagctaaggaaagttatcaggatgcaaatttagtttttgaggagtttgctcgccataatctgaaagatgcaggagaagctgaggaggggaagagagacaagaatgacgttgatgagtgaagatgtcggctcaggatgccggaaaatgacctgtagttaccagtgcaacgagcaaagccccacagtttagtcctttggagttatgctgcgtatgaaaggatgagtcttcttccgagaaataaagcttgtttgttctcccctggaaaaaaaaaaaaaaaaaa

SEQ ID NO: 38 - DNA, 4341 bp, Homo sapiens
ccggcccggcccgcccggcccagccgctcctgctgggcgccccaaccgggtccggcccgggggggcgggggccgcggccgccgaggatggggaaatccaacagcaagttgaagcccgaagttgtggaggagctgaccaggaagacctactttaccgagaaggaggtccagcagtggtacaaaggcttcatcaaggactgccccagtgggcagctggatgcggcaggcttccagaagatctacaagcaattcttcccgttcggagaccccaccaagtttgccacatttgttttcaacgtctttgatgaaaacaaggacgggcgaattgagttctccgagttcatccaggcgctgtcggtgacctcacggggaaccctggatgagaagctacggtgggccttcaagctctacgacttggacaatgatggctacatcaccaggaatgagatgctggacattgtggatgccatttaccagatggtggggaataccgtggagctcccagaggaggagaacactcctgagaagagggtggaccggatctttgccatgatggataagaatgccgacgggaagctgaccctgcaggagttccaggaggggtccaaggcagacccgtccattgtgcaggcgctgtccctctacgacgggctggtatagtcccaggctggagctggatgcctgggaaccactcacctccttctgtgccatgaggccacctcagccctgacaccaaccccgtgcgtccacccagccttcttccgcatccacacacagccggctgcccttgacccgggaggccccggctctcctctcccctgtcctgcacccatcccccgcctgaagccaccggctccaattgccagcaacctctgcttgtccggaaaacgacaacacgaaatggaaaaggctacagccctctgcataaaccaaggacttggctgcctcgcaggcagcctccgttcctcccgctctcttgcgcgtgtgcttttgttttttattttgaacagacgttttaaaagaaaaaaaaacaactaccttctgtcctagaagacacagactgacagatggggtgaaggcctggggacctcagagaactctgccttgccctcgtccctcgtccttcggcagccggagaggctgtgggtgggccgagggtgtctaggggttctgcctagtcaacgttatttgtcgtcccatcttttggcagcaaaaccacctgcgtggctaggatgattaattatgaggatgatgattttttttgtgataacagtattgtgctttttgtggggaaagtgaggttttttttttatatacatatataattgatatctttaatttattggttgttaactgttgctgctgcctggtgtgtcctcagctcccagggctgcgggcccaccgtttacatgtgcacgccctgacccacctgcccacgccgacttgggaggatggtggcctgcagcggccaagaagccaaaaaaaattttttttttttcagatactgtgcttgatttttggagaggggagaggtggaaattcctaaatggctaatgcactgttccctccagcccgaatgcctcctgccaaaccccttttccctgctgcctctgtccccgcatccttgttctcccctgggtccgtaacattttttccgaggatgaacaggggacatctttaggtttctcaactcttgctttggtgtttgccgcagcatggaaaacagggcgcctaaggctgggagctggaagaaggggcattgggtacccaggcagagtcaggagaggtggtctttgaagtaagttagcagaaatcaaggggacccccgcctccttgggctggggaggggatttcaagatagttcataactctctcccgctctgccttccctccttcctatctgctttttccagtaaactgcatggtgtccttccctggccttctcttggctcaaaggctgggagggagggaaggagagaagagttccaggcaatcccatcaatatagtccctacacctggggctgcggcccacatgtcttcacggaggcttccagcggtgcctgccactgaggcaggtgcggccccaggaccatcaccaggaatgcgaggccaccctggaccagaggtaggagcccaaggtccggcccttgctctttgattgtgggcagcctcctgccctctctgggtctcagttgccccatctgcagagcgaggaggcccgggctggttggtcttgaaggcccttttccatgccgacatcatgtcactctaggcctggggttcagtttcctgtggctggtgatgctgtggttaagtttgcttgaccccagcagcccgagggactgtctgagtcacagcacagcccctattgcgtggctgctggtgtgtggggtcagttccagcagatgaatgtgtcatgtggcacaccttgtcccttcccgcagcatttcctggttccccccagacccttgagcgctctttgggacccagaaggagtccttgcacagggaaggcttgaggtgagaagccgcttcccagactgtcagggccaggcctgggtctagaattcttgctgctgctttgcagagtcaacagcccatcagcccatgttttagaggggacactttggtcctcggttcccaccctcagcaagcaggcctccagcccgaggaaggcctctgccgtagtgacgttgccgtgtggggctgcgtggctgttccccttggctggagcattcagccaaccccagcgtcccccctgaggcgttcattggcagccccctaggactgcacgctggccccacggtaaccccccctcccccaccaacatcctgcagggatggggtcagtggttccaccttcacaggccactttgaagggtggattctttgaggcccctgccagtcggctccctgctcagctgctggcccgggcgacctgggactcagcaccaacggctgaagtttctcagctgggctctgacctggggtctggggcagggaacgaacatggtggctttgggctgagaggatgagggaggtctttcccaggtcaaattactttcctttggcctctgcctgaggctcgatttgcctctctggtccaatgggactgacactgttgtacaacctgacctgtggctgagggtgtctgggcttaagcatgtggaccccttcggtgtgtctggccttcctccatcgtcctgccctttggccttttggtttgaagccacaggtgtggcttctggccttagcagatggtatgcttgcggaccgcagcccagcatgccggtgggcccacagcccgagccagcccagagctgccggaagggccgcccttcccggccctggcggggtgctggacactggccattttcactagagtttgcctggcagggaccgatctctgccccctcctctccccaggcctctggctgcagtgatgccgcagaatcctgagccaggtgcctcctgagcagcccgtgcgcctctccacagcggcgtttgccacccaatgcggctcgcttcagatgctctgatgcagagggcacgcccatagtccctctgcagagcctcgcactggggccagggcaggcaccagccccaggcggccagtcggccacggcctgtcctcttcctcgtagcgtctgctcctcactttgtgttgatggtgacttaggagaatgttccgattttccatgatctaagcaggccacgtttaaaataacatcaaggcaagcgtacgtgtcaccctctgtactgacatctcctcccctgaaatgcttttcagtttgacagcccgtttcctagacaagtgcacctggggtttcaggaactttgtgttttttcggagggggttggtggggaggtcgggatgcctgggatcccttcctggagaggcaggctgtctctggaaaaagcctccattgcccacccgccaggcggaaagtcaccctgttcccagcgcggtttcagcatttaattttaagggagctaaggaagcgcggcgcgccccctggtggtggtaagccgccaacgcacctgggggctgcaaccccaccggacgggtggtccggagggaggctggagcggggaggcgaggagggggctgtgagtcctcagaggccctgggccaccacatttctggcagcgtttcccagacacccctctgctaggccatccctggatagcaagtgaattaacttaagggcactgtgatgggaagccttgcccccctctttttttttttttttttaatatctgcggaataaacccaatggttaatttttgaatgaataaaaggcttttgttgaataaaaaaaaaaaaaaaaaaaaaaaaaaaa

SEQ ID NO: 39 - DNA, 4920 bp, Homo sapiens
gagaccgggacgagaccggggctgtggtgcggagagaggctgagacggagaagaggagaggcagagagggcgcggggaccgtcagcagcaccttagctacaatcgttcagctattctcggaagagagaagggagagggaggaggccggggcgggagtgggggctgtcaccctcggaccccggcgtgagaggggccgtgcggccggacgtcctcggggtgggcccccagtcggtggccgaagacctacagctcaggcccctgggtcccaaatttccaggctttgcccctcctcctttctcagatacccgggtaacagtcctcatagtccagatatccgggactcgggtcccaacctctctaaacctgggtctctgtttcatagaatttcaaatatcaggttcaggcccctgcgtgcaccagtatccggggttcattccccgggcgttcaaatatcggattcagtctccatcccgttcagatattcggggttcagaccccacaatcagaaatccggaattcggcagctgtcgccctcgacgagggggaggactggaccgcgaggtcagattaggttgtcaccccctcccctccaggggaggcttcccgggcccgcccctcaggaagggcgaaagccgaggaagaggtggcaaggggaaaggtctccttgcccctctccctgcttggcagagccgctggaggaccccaggcggaagcggaggcgctggggcaccatagtgacccctaccaggccaggccccactctcagggcccccaggggccaccatgccagctgggggccgggccgggagcctgaaggacccagatgtggctgagctcttcttcaaggatgacccagaaaagctcttctctgacctccgggaaattggccatggcagctttggagccgtatactttgcccgggatgtccggaatagtgaggtggtggccatcaagaagatgtcctacagtgggaagcagtccaatgagaaatggcaagacatcatcaaggaggtgcggttcttacagaagctccggcatcccaacaccattcagtaccggggctgttacctgagggagcacacggcttggctggtaatggagtattgcctgggctcagcttctgaccttctagaagtgcacaagaaaccccttcaggaggtagagatcgcagctgtgacccacggggcgcttcagggcctggcatatctgcactcccacaacatgatccatagggatgtgaaggctggaaacatcctgctgtcagagccagggttagtgaagctaggggactttggttctgcgtccatcatggcacctgccaactccttcgtgggcaccccatactggatggcacccgaggtgatcctggccatggatgaggggcagtacgatggcaaagtggacgtctggtccttggggataacctgcatcgagctggctgaacggaaaccaccgctctttaacatgaatgcgatgagtgccttataccacattgcacagaacgaatcccccgtgctccagtcaggacactggtctgagtacttccggaattttgtcgactcctgtcttcagaaaatccctcaagacagaccaacctcagaggttctcctgaagcaccgctttgtgctccgggagcggccacccacagtcatcatggacctgatccagaggaccaaggatgccgtgcgggagctggacaacctgcagtaccgcaagatgaagaagatcctgttccaagaggcacccaacggccctggtgccgaggccccagaggaggaagaggaggccgagccctacatgcaccgggccgggactctgaccagcctcgagagtagccactcagtgcccagcatgtccatcagcgcctccagccagagcagctccgtcaacagcctagcagatgcctcagacaacgaggaagaggaggaggaggaggaggaagaggaggaggaggaagaaggccctgaagcccgggagatggccatgatgcaggagggggagcacacagtcacctctcacagctccattatccaccggctgccgggctctgacaacctatatgatgacccctaccagccagagataacccccagccctctccagccgcctgcagccccagctcccacttccaccacctcttccgcccgccgccgggcctactgccgtaaccgagaccactttgccaccatccgaaccgcctccctggtcagccgtcagatccaggagcatgagcaggactctgcgctgcgggagcagctgagcggctataagcggatgcgacgacagcaccagaagcagctgctggccctggagtcacggctgaggggtgaacgggaggagcacagtgcacggctgcagcgggagcttgaggcgcagcgggctggctttggggcagaggcagaaaagctggcccggcggcaccaggccataggtgagaaggaggcacgagctgcccaggccgaggagcggaagttccagcagcacatccttgggcagcagaagaaggagctggctgccctgctggaggcacagaagcggacctacaaacttcgcaaggaacagctgaaggaggagctccaggagaaccccagcactcccaagcgggagaaggccgagtggctgctgcggcagaaggagcagctccagcagtgccaggcggaggaggaagcagggctgctgcggcggcagcgccagtactttgagctgcagtgtcgccagtacaagcgcaagatgttgctggctcggcacagcctggaccaggacctgctgcgggaggacctgaacaagaagcagacccagaaggacttggagtgtgcactgctgcttcggcagcacgaggccacgcgggagctggagctgcggcagctccaggccgtgcagcgcacgcgggctgagctcacccgcctgcagcaccagacggagctgggcaaccagctggagtacaacaagcggcgtgagcaagagttgcggcagaagcatgcggcccaggttcgccagcagcccaagagcctcaaagtacgtgcaggccagcgccccccgggccttccactccccattcctggggctctgggcccacccaacacaggcacccctatagaacagcagccctgctcacctggccaggaggcagtcctggaccaaagaatgcttggcgaggaggaggaagcagttggagagagaaggattctgggaaaggaaggggccactttggagcccaagcagcagaggattctgggggaagaatcaggagcccctagtcccagtccacaaaaacatgggagcctggttgatgaggaagtttggggtctgcctgaggagatagaggagcttagggtgccctcccttgtaccccaggagaggagcattgttggccaggaggaggctgggacatggagcttgtgggggaaggaggatgagagtcttctggatgaggagtttgagcttggctgggtccagggcccagcactgactcccgtccctgaggaggaggaagaagaggaagagggggctccgattgggacccctagggatcctggagatggttgtccttcccccgacatccctcctgaaccccctccaacacacctgaggccctgccctgccagccagctccctggactcctgtcccatggcctcctggccggcctctcctttgcagtggggtcctcctctggcctcctgcccctcctgctgctgctgctgcttccattgctggcagcccagggtgggggtggcctgcaggcagcgctgctggcccttgaggtggggctggtgggtctgggggcctcctacctgctcctttgtacagccctgcacctgccctccagtcttttcctactcctggcccagggtaccgcactgggggccgtcctgggcctgagctggcgccgaggcctcatgggtgttcccctgggccttggagctgcctggctcttagcttggccaggcctagctctacctctggtggctatggcagcggggggcagatgggtgcggcagcagggcccccgggtgcgccggggcatatctcgactctggttgcgggttctgctgcgcctgtcacccatggccttccgggccctgcagggctgtggggctgtgggggaccggggtctgtttgcactgtaccccaaaaccaacaaggatggcttccgcagccgcctgcccgtccctgggccccggcggcgtaatccccgcaccacccaacacccattagctctgttggcaagggtctgggtcctgtgcaagggctggaactggcgtctggcacgggccagccagggtttagcatcccacttgcccccgtgggccatccacacactggccagctggggcctgcttcggggtgaacggcccacccgaatcccccggctactaccacgcagccagcgccagctagggccccctgcctcccgccagccactgccagggactctagccgggcggaggtcacgcacccgccagtcccgggccctgcccccctggaggtagctgactccagcccttccagcccaaatctagagcattgagcactttatctcccacgactcagtgaagtttctccagtccctagtcctctcttttcacccaccttcctcagtttgctcacttaccccaggcccagcccttcggacctctagacaggcagcctcctcagctgtggagtccagcagtcactctgtgttctcctggcgctcctcccctaagttattgctgttcgcccgctgtgtgtgctcatcctcaccctcattgactcaggcctggggccaggggtggtggagggtgggaagagtcatgttttttttctcctctttgattttgtttttctgtctcccttccaacctgtccccttccccccaccaaaaaaagaaaaagacaaacacaaataaaatatctgagcggaactgtgaaaaaaaaaaa

SEQ ID NO: 40 - DNA, 3121 bp, Homo sapiens
gcttatcgatccgtcgacctcgagggggggcccgcgttcgccgcgcagagccaggcccgccgggcgagcccatgagcaccatgcgcctgctgacgctcgccctgctgttctcctgctccgtcgcccgtgccgcgtgcgaccccaagatcgtcaacattggcgcggtgctgagcacgcggaagcacgagcagatgttccgcgaggccgtgaaccaggccaacaagcggcacggctcctggaagattcagctcaatgccacctccgtcacgcacaagcccaacgccatccagatggctctgtcggtgtgcgaggacctcatctccagccaggtctacgccatcctagttagccatccacctacccccaacgaccacttcactcccacccctgtctcctacacagccggcttctaccgcatacccgtgctggggctgaccacccgcatgtccatctactcggacaagagcatccacctgagcttcctgcgcaccgtgccgccctactcccaccagtccagcgtgtggtttgagatgatgcgtgtgtacagctggaaccacatcatcctgctggtcagcgacgaccacgagggccgggccgctcagaaacgcctggagacgctgctggaggagcgtgagtccaagagtaaaaaaaggaactatgaaaacctcgaccaactgtcctatgacaacaagcgcggacccaaggcagagaaggtgctgcagtttgacccagggaccaagaacgtgacggccctgctgatggaggcgaaagagctggaggcccgggtcatcatcctttctgccagcgaggacgatgctgccactgtataccgagcagccgcgatgctgaacatgacgggctccgggtacgtgtggctggtcggcgagcgcgagatctcggggaacgccctgcgttacgccccggacggcatcctcgggctgcagctcatcaacggcaagaacgagtcggcccacatcagcgacgccgtaggcgtggtggcccaggccgtgcacgagctcctcgagaaggagaacatcaccgacccgccgcggggctgcgtgggcaacaccaacatctggaagaccgggccgctcttcaagagagtgctgatgtcttccaagtatgcggatggggtgactggtcgcgtggagttcaatgaggatggggaccggaagttcgccaactacagcatcatgaacctgcagaaccgcaagctggtgcaagtgggcatctacaatggcacccacgtcatccctaatgacaggaagatcatctggccaggcggagagacagagaagcctcgagggtaccagatgtccaccagactgaagattgtgacgatccaccaggagcccttcgtgtacgtcaagcccacgctgagtgatgggacatgcaaggaggagttcacagtcaacggcgacccagtcaagaaggtgatctgcaccgggcccaacgacacgtcgccgggcagcccccgccacacggtgcctcagtgttgctacggcttttgcatcgacctgctcatcaagctggcacggaccatgaacttcacctacgaggtgcacctggtggcagatggcaagttcggcacacaggagcgggtgaacaacagcaacaagaaggagtggaatgggatgatgggcgagctgctcagcgggcaggcagacatgatcgtggcgccgctaaccataaacaacgagcgcgcgcagtacatcgagttttccaagcccttcaagtaccagggcctgactatgctggtcaagaaggagattccccggagcacgctggactcgttcatgcagccgttccagagcacactgtggctgctggtggggctgtcggtgcacgtggtggccgtgatgctgtacctgctggaccgcttcagccccttcggccggttcaaggtgaacagcgaggaggaggaggaggacgcactgaccctgtcctcggccatgtggttctcctggggcgtcctgctcaactccggcatcggggaaggcgcccccagaagcttctcagcgcgcatcctgggcatggtgtgggccggctttgccatgatcatcgtggcctcctacaccgccaacctggccgctttcctggtgctggaccggccggaggagcgcatcacgggcatcaacgaccctcggctgaggaacccttctgacaagtttatctactccacggtgaagcagagctccgtggatatctacttccggcgccaggtggagctgagcaccatgtaccggcatatggagaagcacaactacgagagtgcggcggaagccatccaggccgtgagagacaacaagctgcatgccttcatctgggactcggcggtgctggagttcgaggcctcgcagaagtgcgacctggtgacgactggagagctgtttttccgctcgggcttcggcataggcatgcgcaaagacagcccctggaagcagaacgtctccctgtccatcctcaagtcccacgagaatggcttcatggaagacctggacaagacgtgggttcggtatcaggaatgtgactcgcgcagcaacgcccctgcgacccttacttttgagaacatggccggggtcttcatgctggtagctgggggcatcgtggccgggatcttcctgattttcatcgagattgcctacaagcggcacaaggatgctcgccggaagcagatgcagctggcctttgccgccgttaacgtgtggcggaagaacctgcaggatagaaagagtggtagagcagagcctgaccctaaaaagaaagccacatttagggctatcacctccaccctggcttccagcttcaagaggcgtaggtcctccaaagacacgcagtaccatcccactgatatcacgggcccgctcaacctctcagatccctcggtcagcaccgtggtgtgaggcccccggaggcgcccacctgcccagttagcccggccaaggacactgatgggtcctgctgctcgggaaggcctgagggaagcccacccgccccagagactgcccaccctgggcctcccgtccgtccgcccgcccaccccgctgcctggcgccaccctgctggaccaaggtgcggaccggagcggctgaggacggggcagagctgagtcggctgggca

SEQ ID NO: 41 - DNA, 2932 bp, Homo sapiens
ggctggctgcggcggccggggaggccggggaggccgcggcgcggtcactgcgagccgagccgagccgcgccgagccgcgccgatcgccatccggcctcggcactcgcgcgcgatcccggccggcggcgcggcccggcgggccaggcggcgccacagcccatggagctcgagaacatcgtagcgaacacggtgctactcaaggcccgggaaggtggcggtggaaatcgcaaaggcaaaagcaagaaatggcggcagatgctccagttccctcacatcagccagtgcgaagagctgcggctcagcctcgagcgtgactatcacagcctgtgcgagcggcagcccattgggcgcctgctgttccgagagttctgtgccacgaggccggagctgagccgctgcgtcgccttcctggatggggtggccgagtatgaagtgaccccggatgacaagcggaaggcatgtgggcggcagctaacgcagaattttctgagccacacgggtcctgacctcatccctgaggtcccccggcagctggtgacgaactgcacccagcggctggagcagggtccctgcaaagaccttttccaggaactcacccggctgacccacgagtacctgagcgtggccccttttgccgactacctcgacagcatctacttcaaccgtttcctgcagtggaagtggctggaaaggcagccagtgaccaaaaacaccttcaggcaataccgagtcctgggcaaaggtggctttggggaggtgtgcgcctgccaggtgcgggccacaggtaagatgtatgcctgcaagaagctagagaaaaagcggatcaagaagcggaaaggggaggccatggcgctgaacgagaagcagatcctggagaaagtgaacagtaggtttgtagtgagcttggcctacgcctatgagaccaaggacgcgctgtgcctggtgctgacactgatgaacgggggcgacctcaagttccacatctaccacatgggccaggctggcttccccgaagcgcgggccgtcttctacgccgccgagatctgctgtggcctggaggacctgcaccgggagcgcatcgtgtacagggacctgaagcccgagaacatcttgctggatgaccacggccacatccgcatctctgacctgggactagctgtgcatgtgcccgagggccagaccatcaaagggcgtgtgggcaccgtgggttacatggctccggaggtggtgaagaatgaacggtacacgttcagccctgactggtgggcgctcggctgcctcctgtacgagatgatcgcaggccagtcgcccttccagcagaggaagaagaagatcaagcgggaggaggtggagcggctggtgaaggaggtccccgaggagtattccgagcgcttttccccgcaggcccgctcactttgctcacagctcctctgcaaggaccctgccgaacgcctggggtgtcgtgggggcagtgcccgcgaggtgaaggagcaccccctctttaagaagctgaacttcaagcggctgggagctggcatgctggagccgcccttcaagcctgacccccaggccatttactgcaaggatgttctggacattgaacagttctctacggtcaagggcgtggagctggagcctaccgaccaggacttctaccagaagtttgccacaggcagtgtgcccatcccctggcagaacgagatggtggagaccgagtgcttccaagagctgaatgtctttgggctggatggctcagttcccccagacctggactggaagggccagccacctgcacctcctaaaaagggactgctgcagagactcttcagtcgccaaaggattgctgtggaaactgcagcgacagcgaggaagagctccccacccgcctctagcccccagcccgaggcccccaccagcagttggcggtagcagctactccgagcgccgtttacagttttgcacagtgatcttccccattgtccactcaagtcgtggcctggggaacacagacggagctgtccccagtgtcctccgtccctcagcccctggcctggctgagtttggcagggcctgggccatccctgggacaaaggtgcgtcccttcagctcttctccgtggagctcggggctttctgtatttatgtatttgtacgaatgtatatagcgaccagagcattcttaattcccgccgcagacctggcgcccccgccttggctcctgggggcagccagccctggctgggagagcgggagctggcagaggagccactgccaaactcaaggctcctctggcccagcttggatggctgagggtggtcacacccctgagccttcagcactgtgctggccaccccggcctctgagtaagactcgtgcctccccctgctgccctgggctcaggctgctaccctctggggcccaaagctgtcccttctcagtgcttgtcagcgctgggtctggggcctctgtatgccctaggcctgtgccaaagtggccagagattgggctgcctgtgatacccatcagcccactgccccggccggcccagataggtctgcctctgccttccagctcccacagcctggtccctgatactgggctctgtcctgcagacacctctttcagaaacgcccaagcccagcccctaggagggggtggggcatccctggtcaaccctcaaacattccggactcccctcataacaatagacacatgtgcccagcaataatccgccccttcctgtgtgcgcctgtggggtgcgtgcgcgcgcgtgtgtacctgtgtgggtgaaggggatagggcgaggctgtgcctgtgccccaggtcccagccctggcccttcccagactgtgatggccatcctggtcccagtgttagggtagcatgggattacagggccctgttttttccatatttaaagccaatttttatta

SEQ ID NO: 42 - DNA, 2894 bp, Homo sapiens
agcctgcaaaaaccacagagggcaaagccagaaagatggaaaggcacccatgcagctcaccacttgcctcagggagaccctcttcacaggggcttctcaaaagacctccctatggtggttgggcattgcctccttcggggttccagagaagctgggctgcgccaatttgccgctgaacagccgccagaaggagctgtgcaagaggaaaccgtacctgctgccgagcatccgagagggcgcccggctgggcattcaggagtgcgggagccagttcagacacgagagatggaactgcatgatcaccgccgccgccactaccgccccgatgggcgccagccccctctttggctacgagctgagcagcggcaccaaagagacagcatttatttatgctgtgatggctgcaggcctggtgcattctgtgaccaggtcatgcagtgcaggcaacatgacagagtgttcctgtgacaccaccttgcagaacggcggctcagcaagtgaaggctggcactgggggggctgctccgatgatgtccagtatggcatgtggttcagcagaaagttcctagatttccccatcggaaacaccacgggcaaagaaaacaaagtactattagcaatgaacctacataacaatgaagctggaaggcaggctgtcgccaagttgatgtcagtagactgccgctgccacggagtttccggctcctgtgctgtgaaaacatgctggaaaaccatgtcttcttttgaaaagattggccatttgttgaaggataaatatgaaaacagtatccagatatcagacaaaacaaagaggaaaatgcgcaggagagaaaaagatcagaggaaaataccaatccataaggatgatctgctctatgttaataagtctcccaactactgtgtagaagataagaaactgggaatcccagggacacaaggcagagaatgcaaccgtacatcagagggtgcagatggctgcaacctcctctgctgtggccgaggttacaacacccatgtggtcaggcacgtggagaggtgtgagtgtaagttcatctggtgctgctatgtccgttgcaggaggtgtgaaagcatgactgatgtccacacttgcaagtaaccactccatccagccttgggcaagatgcctcagcaatatacaatggcattgcaaccagagaggtgcccatccctgtgcagcgctagtaaagttgactcttgcagtggaatccctagaaccttggacctgagagtttcccttacctgatcgacatattttcctttatctgatcaacccatcaatcatgtggatttcttgggattctaatgttgaaaaggtttatattcaccttttgatgatttggggaatatatattgacatacaaggaagataatctgtttcctaagcaagaaataacaggaaagatcccttatgccaggaggcctgccatactcaggataagatccttgaatatggaacttagttacaggactcaataatggtgggtgaacattagtcatttttaaaagacacctcttatagcaataaggagacattaacatgaatctcatttattctctcagtattttaactgaagaaattatactgtttgtgtgtggatagaagatgttgaaaagttaacataagcattgggtgctgacttaccctttcatgtacttccaaagaaaggtaatcaaaaagaatcttcttaagtgatataatatccctaaaaaaatgatcattacagatgtttagtgacaaagaatcaatatgtaaaaagtataatgaatgatttagattttaagtgccttttcactgggagaatctggaaaaacctccataaggtatatagcaatctttgatctttagattcatacttttatcacagatcagtttcaactgttaaaaacccacctctgagatactggggggaggatcctgaaacatgcgggaaaaggagaggtaaacagtggaggtaaaaatataatttcatacattgtaaagaaaagcaccctttaaatgtgtaaagacagtgttttgtaaagaattttgtttaaaaagtttctattttgtaaatacagtacttaagttatatgatttatattaaaacatttattgacaaagcctaagagctaaggcagtaaaattatctcataaataatattagcttattttttttcatactattaatgctatttttttggacatcgaagagaatttaacttagcagttagttatatggatgtgtatttcttgctaaaatgacagttttatatgttatagattaaaatatgttgcaaaatatcaaaaatttgtgttatttcagcagtaagattaattgaattctcttttcacattagttatgcttaactcataaggttattataataaattatattagtaaaagtcttaactggaaaaaagaatctaaatcagaatagtgatcaatttgtggatttgatatcctggatatttattatattttatgtaatgctgcatttctatttgaatgttaagtggtctttcttgtttttaatattcatgcatgtatattcatcatattttacaaggttcctggtaaaaattacagggctctatttaaggatgtattttaatgtaaatgcttatgttttttatgaattgttaaatatttcagtattatatagaaaaaaatagatttttaaaattcagaatggacaaagagaatattcattttcttattaataagataaagaaatgtttccctgccccacagtcttcattctatttctctttaattttattcactgaggcagagaaacaatttttgaaaaagagcaaacccatggaaaatgtctcagatctaatattaaaatcaagactaagcatttaactgtgaaaaaaaaaaaaaaaaaaa

SEQ ID NO: 43 - DNA, 2015 bp, Homo sapiens
gcgatgtcggtggccgggctgaagaagcagttccacaaagccagccagtagagatgggtttcaccatgttggccaatatggtctcgatctcctgacctcgtgatccgcctgcctcggcctcccagagtgctgggattacaggtgtgagccactgtgcccagcctcttctctcactatccgtttctgacaaatgaaaaaaatggatgtgggtcctgcagaacctgaggccagctctaaccagtctttcatggatgcatacacctgcctgcaggcgctgctcccaggttatgaggctggttcttgggtttgactctgggaatcatgctcattgatctgcttttcctaatcatgtcagtgaatacctacacgtgaagaaaactcaagctgcaccataaagctaaaggaagaaggagcttttaagtgaataagaccattttcccaatgagcagtgtcataaacattgaggactctcttaaatcagaagatgaatgaatggatggaatctttgctgggataatatgcaatcaagctaataggtgccttacctggacctcccaacagctatttagtgaaaaaataagtggtgctgaaggaactaaactagacgatgaatttcttgacatggaaaggaaaatagatgttaccaataaagttgttgcagaaattctttcaaaaaccactgaatatcttcagccaaatccagcatacagagctaagctaggaatgctgaacactgtgtcgaagatccgagggcaggtgaagaccacaggatacccgcagacggaaggcttgctgggggactgtatgctgaaatacgggaaggagctcggggaagactccacctttggcaatgcattgatagaagttggtgaatccatgaagctaatggctgaggtgaaagactctcttgatattaatgtaaagcaaacttttattgatccacttcagttactacaagataaagatttaaaagagatcgggcatcacctgaaaaagctggaaggccgccgcctggattacgattataaaaagaaacgagtaggtaagataccagacgaagaagtcagacaagcggtagaaaaatttgaagagtcaaaggagttggctgaaagaagcatgtttaactttttagaaaatgatgtagaacaagtcagccagttggctgtgttcatagaggcagcattagactatcacagacagtccacagagattctgcaggagctgcagagcaagctacagatgcgaatatcagctgcatccagtgtccccagacgagaatacaagccaaggcctgtgaaaaggagttctagtgagctcaatggagtttccaccacctctgtagtgaagacgacaggttctaacattcccatggaccagccctgctgtcgtggtctctatgactttgagccagaaaaccaaggagaattaggatttaaagaaggggacatcattacattaaccaatcaaatagatgaaaactggtatgaaggaatgatacacggagaatcgggattcttccccattaattacgtggaagtgatcgtgcctttacctcagtaaatgtgtaacacaaactctggacatactttcgtaactgaaatgaattcacaccagtgtgctctcagtgcggtgttctgtgacatcctttgctctctgaccaacttaatgacttttgtatgtgtgctctctttataatgtattttatatcactttaatttgtataaatgattttcttgtccttgctacatgaaaatattgttttcttttttgcttcctgtcctaaaagtcattggttaaatgtatttgcttcctgtggctaaaaataagtctcacccattgcagttatgtcaacgaatggcctatattcctcagctgcaatgaaatggtaacatttgaaactaagaaatgctaaatattttgtttctcgacattcctgatgacgtctggtcttttcttttcattgtattttaagcttacctgtgaatagcccaataaacatgacacactgtgttggc

SEQ ID NO: 44 - DNA, 1910 bp, Homo sapiens
ggggccgtctctgcgaccgccgcgcccgctcccgaccgtccgggtccgcggccagcccggccaccagccatggctctggccgctctcgctgcccctggcgctgtcgcgccgcggctgctgctgctgctgctgtctctgctgccagtggccagggcctcagaggctgagcaccgtctatttgagcggctgtttgaagattacaatgagatcatccggcctgtagccaacgtgtctgacccagtcatcatccatttcgaggtgtccatgtctcagctggtgaaggtggatgaagtaaaccagatcatggagaccaacctgtggctcaagcaaatctggaatgactacaagctgaagtggaacccctctgactatggtggggcagagttcatgcgtgtccctgcacagaagatctggaagccagacattgtgctgtataacaatgctgttggggatttccaggtggacgacaagaccaaagccttactcaagtacactggggaggtgacttggatacctccggccatctttaagagctcctgtaaaatcgacgtgacctacttcccgtttgattaccaaaactgtaccatgaagttcggttcctggtcctacgataaggcgaaaatcgatctggtcctgatcggctcttccatgaacctcaaggactattgggagagcggcgagtgggccatcatcaaagccccaggctacaaacacgacatcaagtacaactgctgcgaggagatctaccccgacatcacatactcgctgtacatccggcgcctgcccttgttctacaccatcaacctcatcatcccctgcctgctcatctccttcctcactgtgctcgtcttctacctgccctccgactgcggtgagaaggtgaccctgtgcatttctgtcctcctctccctgacggtgtttctcctggtgatcactgagaccatcccttccacctcgctggtcatccccctgattggagagtacctcctgttcaccatgatttttgtaaccttgtccatcgtcatcaccgtcttcgtgctcaacgtgcactacagaaccccgacgacacacacaatgccctcatgggtgaagactgtattcttgaacctgctccccagggtcatgttcatgaccaggccaacaagcaacgagggcaacgctcagaagccgaggcccctctacggtgccgagctctcaaatctgaattgcttcagccgcgcagagtccaaaggctgcaaggagggttacccctgccaggacgggatgtgtggttactgccaccaccgcaggataaaaatctccaatttcagtgctaacctcacgagaagctctagttctgaatctgttgatgctgtgctgtccctctctgctttgtcaccagaaatcaaagaagccatccaaagtgtcaagtatattgctgaaaatatgaaagcacaaaatgaagccaaagagattcaagatgattggaagtatgttgccatggtgattgatcgtatttttctgtgggttttcaccctggtgtgcattctagggacagcaggattgtttctgcaacccctgatggccagggaagatgcataagcactaagctgtgtgcctgcctgggagacttccttgtgtcagggcaggaggaggctgcttcctagctggagtgcaatggcgtgatctcagctcaccgcaacctccgccacctgggttcaagcgattctcctgccgcagcctcccaggtagctgggattacaggaacaaaaagcccaagagatccaacaattgaaacgaaaagaaaagtccacagaaacatccgatcaagaacctgggctatgaatttccaatcttcaacaacctgttaggaaaaaaataaaaatgcattaaataattgtaaaaaaaaaaaaaaaaaaatctagagtcga

SEQ ID NO: 45 - DNA, 342 bp, Homo sapiens
agatgctggagaactccttgtgcagccccacctgggaaggatcccagttctgggtaacggtgcagaggactgaggcggtcgagcactgtggcctgcatgcctcctacgtgctgagggtggaggctgaaaggctgactctcctgaccatgggagcccagagtcaggtaccggagctgctcctgtcctggccctacactctgttgcattgctatggccgggacaaggtcatgttctcttttgaggccagcgccgctgcctcttgggccctggaaccttcctttccagacggcacagggaaatgacatcttccaggcagatgagactgccatccaccggcagaag

SEQ ID NO: 46 - DNA, 754 bp, Homo sapiens
gagttcttgcaagtcggccaggatgtctcaggtacagcgcgtgcacagccaggctgcgaaggtgcagcgggcgggaggcccgttgggggctcagccggctgccagaagctctcgggctctttccttccgtgcccctcacttgctcatgggcccatgcctagccctgattcgttggacagagcctttgtagacccttgtctgagaccgagctatgtggggcgacctctggctcctcccgcctgcctctgccaatccgggcactgggacagaggctgagtttgagaaagctgcagaggaggttaggcaccttaagaccaagccatcggatgaggagatgctgttcatctatggccactacaaacaagcaactgtgggcgacataaatacagaacggcccgggatgttggacttcacgggcaaggccaagtgggatgcctggaatgagctgaaagggacttccaaggaagatgccatgaaagcttacatcaacaaagtagaagagctaaagaaaaaatacgggatatgagagactggatttggttactgtgccatgtgtttatcctaaactgagacaatgccttgtttttttctaataccgtggatggtgggaattcgggaaaataaccagttaaaccagctactcaaggctgctcaccatacggctctaacagattaggggctaaaacgattactgactttccttgagtagtttttatctgaaatcaattaaaagtgtatttgttactttaaataa

SEQ ID NO: 47 - DNA, 436 bp, Homo sapiens
  misc_feature (208)..(208): n is a, c, g, or t
tttttgaaatacatgattatgttattggtgaaggtgtcacaacatgcaagatgggggagttgagaagggtcacagaagaaattaggaatttccgcatcctggaagcaggtcatttgtaaggcaatcaagttgtgcagctgggcgtctaaaacactggaggactgtgggtataggtgtccaagaagaaagctcaaatctgccgacggtnggtaccttacttgggatttactatccgacaggtgtcagaacgcagcccgggaacagaaagtaagcaggtcatttgcaatctactggagcctggaggactgtgggtattaggtgtccaaggagaaagctcaaatctgccgacggaggtacctggaggactgtgggtattaggtgtcaagaagaaagccaaatctgctgacggcaggtaccttacttgggatttactatc

SEQ ID NO: 48 - DNA, 3347 bp, Homo sapiens
tgcccaagacgggtctggagcctgacttccgggtgtccatgaccctggcggctgcttccggtccgccatgaaagggctatcaggcagccgcagccatcaccacggggtcacctgcgactcggcctgtgactcgctgtcgcaccactccgaccgcaagccctacctgctgagcccagtggagcaccaccccgcagaccacccatactacacccagcggaactccttccaggctgagtgcgtgggccccttcagcgacccgctggccagcagcaccttcccccgcaggcactacacctcgcagcaagagctgaaggacgagtgtgccctggtgccccgcaccctggccaccaaggcgaaccgcatccccgccaacctgctggaccagttcgagcggcagctgccactcagccgcgatggctatcacaccctgcagtacaagcgcacggccgtggagcaccgcagcgacagccccggccgcatccgccacctggtgcactcggtccagaagctcttcaccaagtcgcactccctggaggggccgtccaagggcagcgtcaacgggggcaaggccagccctgacgaggcgcaggcggcgcgctatggcaaacgcagcaagagcaaggagcggcgcgcggagcccaaggcccggcccagcacctccccgggctggtggagctcggacgacaacctggatggtgacatgtgcatctaccacgccccctcgggcgtgatgaccatgggcaggtgccccgaccgctcggcctcacagtacttcctggaggcctacaacaccatcagcgagcaggcggtgaaggcctcccggagcaacaacgacgtcaagtgctccacctgcgccaacctgccggtcagcctggacaccccgctgctgaagaagagcgcctggtcctccacgctcaccgtgagccgggcccgggaggtttaccagaaggcctcggtgaacatggaccaggccatggtgaagtccgagtcgtgtcagcaagaacgctcctgccagtacctgcaggttccacaagatgaatggacagggtacaccccacgaggtaaagatgatgaaattccatgccgaagaatgcggagtggcagttatatcaaggccatgggggatgaagacagtggagactcagacacgagtcctaagccttctccaaaagttgctgcgcggagagaaagctatctcaaggctactcagccatcccttacagaactcaccacactcaaaatctccaatgaacactcacccaaactccagatccggagtcatagttacctgagggcagtgagtgaagtctccatcaaccggagcctggacagcctggaccctgcaggcttgctcacatcaccaaagttccgctccaggaatgagagctacatgcgagccatgagcaccatcagccaggtgagcgagatggaagtgaacgggcagttcgagtccgtgtgcgagtccgtgttcagcgagctggagtcgcaggccgtggaagcgctggacctgcccatgcccggctgcttccgcatgcggagccacagctatgtgcgggccattgagaaaggctgctcccaggacgacgagtgcgtgtccctgaggtcgtcctcgccgccgcgcaccaccaccaccgttaggaccatccagagcagcacggtgtcatcttgcattacaacatataagaagacaccacctccagtcccacccagaactaccacgaaacctttcatttctatcacagcccagagtagcacagagtcagcccaggatgcctacatggacggacagggccagcgaggagatattatcagccagtctggactcagcaactccaccgagagcctggacagtatgaaggctctgacagccgccatcgaagctgcaaacgcccagatccatggccctgccagtcaacacatgggcaataacactgccactgtcaccaccacgactaccatagccaccgtcaccacggaggacaggaagaaggaccactttaagaaaaatcgatgcctgtctatcgggatacaggtggatgatgctgaagaacctgacaaaacaggggagaataaagcacccagtaagttccagtccgtgggagtgcaagtagaagaagagaagtgcttccgcaggttcactcgatccaacagtgtgacgacagcagtacaggccgacctggacttccatgataatctggaaaattctctggaatctatagaggacaattcgtgtcctggccccatggccagacagttctcccgcgatgccagcacctccacagtcagcattcagggctcaggaaaccattaccatgcctgtgccgccgatgatgactttgacacggattttgacccctctattctgcctcctccggacccctggattgactctatcactgaagaccctctggaggccgtgcaaaggtcagtgtgccaccgggatggccactggttcctgaagcttctccaggcagagcgagaccgcatggaggggtggtgtcaacagatggagcgggaagaacgggaaaacaacctgcccgaagacattctaggaaaaatccgaaccgcagtgggcagtgcccaacttctcatggcccagaaattctaccagttcagagaactgtgtgaagaaaacctgaatcctaatgctcatccaagacccacctcccaggatttggcggggttttgggacatgctgcagttgtccatagaaaatattagtatgaaatttgatgaacttcatcagttaaaggccaataattggaaacagatggatcctcttgacaagaaggagagaagggcccctcctccagtgccaaagaagccggcgaagggccccgcgccgctgatccgggagcgctcgctggagagctcgcagcgccaggaggcccgcaagcgcctgatggccgccaagcgcgccgcgtccgtccgccagaactcggccaccgagagcgccgagagcatcgagatctacatccccgaggcgcagacccggctctgagcgccccgcagcccggccgccgccgccaagcatctgtcccctcctcccccggccgctcctctgccggctgcctctccccctccgagcccgtccgctcccgagctcggtgacttccactgtcgcggtgtagttgtccacctcgcaggagccgccccccgggcccccctcagccccccacttcccgtacccgtttgcccatctccttcttcaccgagcttcgccccctgtcctgatgccgtcgccctgcctcatactgagatccaaccctttattttctgggcaaagccaaacccacctgtgtagaagtgatgcctttaggtcacccgccgtcctcagttctctcgag

SEQ ID NO: 49 - DNA, 3385 bp, Homo sapiens
gccttcccaccatggattgccaagaaaatgagtactgggaccaatggggacggtgtgtcacctgccaacggtgtggtcctggacaggagctatccaaggattgtggttatggagagggtggagatgcctactgcacagcctgccctcctcgcaggtacaaaagcagctggggccaccacagatgtcagagttgcatcacctgtgctgtcatcaatcgtgttcagaaggtcaactgcacagctacctctaatgctgtctgtggggactgtttgcccaggttctaccgaaagacacgcattggaggcctgcaggaccaagagtgcatcccgtgcacgaagcagacccccacctctgaggttcaatgtgccttccagttgagcttagtggaggcagatgcacccacagtgccccctcaggaggccacacttgttgcactggtgagcagcctgctagtggtgtttaccctggccttcctggggctcttcttcctctactgcaagcagttcttcaacagacattgccagcgtggaggtttgctgcagtttgaggctgataaaacagcaaaggaggaatctctcttccccgtgccacccagcaaggagaccagtgctgagtcccaagtgagtgagaacatctttcagacccagccacttaaccctatcctcgaggacgactgcagctcgactagtggcttccccacacaggagtcctttaccatggcctcctgcacctcagagagccactcccactgggtccacagccccatcgaatgcacagagctggacctgcaaaagttttccagctctgcctcctatactggagctgagaccttggggggaaacacagtcgaaagcactggagacaggctggagctcaatgtgccctttgaagttcccagcccttaactctaatgaggtctcttgggcccctggcagccttgcccagttgttctctctggactctgttcctataccacaacagcagcaggggcctgaaatgtgatgtccacaagagctaataccctacagatggggcatatcctatcccatcccaccagaggattgattctccatttcacaaggactgatctggagcatttcttgcttcccttttgtagtctggggagccagattccacattcatgggactaccagacatgttcctagctcaacttgattatagagaagaggagagaggacagtgaatggggtagggttttcatgtctgcatttttggtcaggtaagcctctcaaaattgtgttggcacatctacctagcactttagggacaaaatcaaacccttctccccttttagctcctccacactgtctccctcctcaacacacacacacacacatacacacacatatacatagacacacaaacacacacacacacattaatatctatcttgggggaggcctcgtgccataattcccaagttcatgtctcagactgctgcattgcagcatgaggcagggcaaacactttccctctagatccctggggcctcaccctgtatttgaggttctcaccaccctcagcagggagaagggctgaagttcgccattttggaaccttacagaacatttctgagccaaagtaatcttccttctggggcctgagttccccaaactaccccacagcagtccctcaaagacagccctcaatccatgtagggacatctgagtatgcctctttctattgaaatgtcaattcaatcccagctttctcaccaccgttcccctttgattctttctcaattgtctttttgcctttagctcccacctatacatctcatgctcagagaaaaacaagttccttagaggttgtattctttattctccaagaatctgtctgaaacttgtacagctagttcctgtcccacaactattaagtggtttattaagtacattaggcagaatgtgcacttcatcaccaggttctagctctggcaaaggagtgctgtctacagcaagatttttgcttttagaattttattaactacatcttttgggttcatccatctacaaacactgattaagggcccctggggcaaccaattgatcagattactaaaaggacttgggaaaaagcaaaaaggtcccattgtactggactgaggattagaagcaattgaaatacaagcctgtaccaagcaagcagcctggccccacacaggtattagcaaatatgtggtaaccaaggttttaggccttggcctttaggtttcctgttttttttttgtttttgtttttgtttttgtttttctgcaacaggttattcttatctcactggctttcactgatcatgtttagaccttctggtagaagaaataatatccagacaggggatgatttggcttcagcaggctgcaggtgttcaaaggttgccatgtggctggcagtggttcaagcccacatttgacactgctgctctagaggaaagataatgatggtaacacagtaataataataataataacaaaaatatgataaagtgaaagagtaagacttcttcagtgtgcttgctcatggcatgaatgctatgtggacagcccaagccatacccagaatcaccttaattccaactttttgaggttcagcaattggaggtggcaattggctttgcattttaaagtatttcgggtaaaggtgaagtgaaggattttcgtctttataatttctgtttggccatggcaaataccatagttgagtatttgcttcaggagagttctttttacagttttacttttcaatgctgaggcatatttctttgagcactgtgcttttatgtgtctttctacaaaggggttattggtcagtggaagaacaaagtacacttgataaaaacattttcaacatacattgagcctaaacagcagttaagttgtctctaaatgaactagcaaaaaaaaaaaatgtagtttttgtttgtaaggaaggggaggtatttcctgagaatgaatttttttttttttggattactgtttttctctccatataccttgacttggattttgacaggagggagcctgggaaaataattttttcctccaagattctcagatccaggttaggaaaggattcagcactacagcatacccctctacaacatacagccctgtcacattgagatcataatccctcctgtcccactcctctctaccaaccccaccctactagctaggtcttcagtgttttacattgaatattggtacattttaattattttttctcataaatgggttatttatagaaattttgttaactcttgagccatatgcatgtgtagatactggcagggctatgtttgtttatgatgctctgcaaacatttcatattggccaataaacagaaatatatccaaaaaaaaaaaaaaaaaa

SEQ ID NO: 50 - DNA, 945 bp, Homo sapiens
atgccactaactaatgaaagccaccctgaagaatttattctgctaggctttgcagaccgcccttggctagagcttcctctgttcactagtcttcttataatgtaccctatagccgtgatgggaaacatcacaatcattctcatgtccaggttagactctcgtcttcatagccccatgtactttttcctcaccaacctctcctttttggacatgtgttataccacaagcattgtccctcagatgctgtttaacctgggaagctctaagaagaccatcagctatatggggtgtgcggttcagctttatttctttcacataatggggggaacagaatgtttgcttttggctattatgtcctttgatcgctatgtggccatctgcagacctcttcactacaccctcatcatgaatcagcgcgtctgtatccttagtttccaccgtgtggctaattggaataatctatgctgtctcagaggccactgccacattacaattgccactgtgtgctctaataaactggaccacttggtgtgtgagattcctgttctgataaagattgcctgtggtgaaaagggttctaacgagctcacactctctgtggtatgcatttttatgttagctgtcccactatgcttaattcttgcttcctatgctagtattggaagtgctgtatttaagatcaaatcttccaagggaaggaaaaaggcctttgggacatgctcctcccatcttattgtagttttcttattttatggcccagccatcagcatgtaccttcagcccccctcctccatctcaagggatcaacccaagttcatggccctcttctatggagtggtgactccctcactcaacccttttatctacaccctgcggaataagaatgtaaagggggcattacgcaacttggtgaggagcatttcagctttaagtgatagtgggtag

SEQ ID NO: 51 - DNA, 1134 bp, Homo sapiens
cagggagagagaactggccagggtataaaaagggcccacaagagaccggctctaggatcccaaggcccaactccccgaaccactcagggtcctgtggacagctcacctagcggcaatggctgcaggctcccggacgtccctgctcctggcttttgccctgctctgcctgccctggcttcaagaggctggtgccgtccaaaccgttccgttatccaggctttttgaccacgctatgctccaagcccatcgcgcgcaccagctggccattgacacctaccaggagtttgaagaaacctatatcccaaaggaccagaagtattcattcctgcatgactcccagacctccttctgcttctcagactctattccgacaccctccaacatggaggaaacgcaacagaaatccaatctagagctgctccgcatctccctgctgctcatcgagtcgtggctggagcccgtgcggttcctcaggagtatgttcgccaacaacctggtgtatgacacctcggacagcgatgactatcacctcctaaaggacctagaggaaggcatccaaacgctgatgggggtgagggtggcgccaggggtcgccaatcctggaaccccactggcttagagggctgggggagagaaacatgctgccctctttgtagcagtcaggcgctgacccaagagaactcaccttattcttcatttcgcctggtaatcctccaggcccttctctacaccctgaaggggagggaggaaaatggatgaatgagagagggagggaacagtgcccaagcgcttggcctctccttctcttccttcactttgcagaggctggaagacggcagccgccggactgggcagatcctcaagcagacctacagcaagtttgacacaaactcacacaaccatgacgcactgctcaagaactacgggctgctctactgcttcaggaaggacatggacaaggtcgagacattcctgcgcatggtgcagtgccgctctgtagagggtagctgtggcttctaggtgcccgcgtggcatcctgtgaccgacccctccccagtgcctctcctggccctggaaggtgccactccagtgcccatcagccttgtcctaataaaattaagttgtatcatttca

SEQ ID NO: 52 - DNA, 6390 bp, Homo sapiens
cccgcgcagacttgtctccggccagtcgcgcgtgggtagaggccttaggcgggcgttgcgaagggttgtttgctagagttcggaccttgttacggcgcgaagttccctccttggggcgggggaaaggtaccgcacccgctacctagtgtgaatgaactgtggcgtgggctgctaagggcaggctgcggagtacccgggccgtggccatgaactcacccgtggaccctggcgctaggcaggcgttgaggaagaagccacccgagcggactcccgaggacttaaatactatttattcttatcttcatggaatggaaatattatcaaatctcagggaacatcagcttagattaatgtctgcaagagcacgctatgagagatacagtggcaatcaggttctcttttgttcagaaacgattgccagatgttggtatatcctactttctggatctgtgcttgtgaaaggctccatggtcttgcctccttgcagttttggtaagcagtttggaggaaaaagaggatgtgattgtcttgtattagagccttcagaaatgattgtggtagagaatgccaaagataatgaagatagtattctacaaagagaaattcctgccagacaatcccgaagaagatttcggaaaattaactataaaggagagcgccaaaccattactgatgatgtggaggttaacagctatctttctcttccagctgatcttaccaagatgcatctcacagaaaaccctcatccacaggtgactcatgtgtcttctagtcagtctggttgtagcattgccagtgactctggaagcagcagtttatctgatatctatcaggctacggagagtgaggtaggagatgtagatttgacacgtcttccagaaggacctgttgattctgaggatgacgaagaggaagatgaagagattgatcgaacagatccattgcaggggcgagatcttgttcgagaatgtcttgaaaaagaacctgcagacaaaactgatgatgacattgaacaattgctggagtttatgcaccagctccctgcatttgcaaacatgaccatgtctgtaaggagagaactctgctcagtgatgatttttgaagtggtagagcaggctggagctattattcttgaagatgggcaagagcttgactcatggtatgttattttaaacggcactgtggaaatcagtcatccagatggaaaagttgaaaatttgtttatgggaaatagttttggaattactcccactctggataagcagtacatgcatggaattgtcaggactaaagtagatgattgtcagtttgtctgcatagcccagcaagattattggagaattttaaaccatgtggaaaaaaatacccataaagttgaggaagagggagaaattgttatggtacatgagcatcgggaactagaccggagtggaaccaggaaaggacacattgtgatcaaggcaacacctgagcgtctcataatgcatttaatagaagaacattccatcgtggatccaacttatatagaagattttctattaacttacaggacatttcttgaaagtcctttggatgttgggatcaaactattggaatggtttaagatcgacagcttaagagataaggtgacacggattgtattattatgggtaaataatcattttaatgattttgaaggtgaccctgctatgactcgatttctagaggaatttgaaaaaaatctggaagatacaaagatgaatggtcatctccggttattgaatattgcctgtgctgcaaaggctaagtggagacaggttgtgctgcaaaaggcttcccgcgagtcccctctacaattcagccttaatggagggagtgagaagggatttggtatttttgttgaaggagtagaacctggtagcaaagctgctgattcaggactgaaacgtggtgatcagattatggaagtaaatggacaaaactttgagaatattacatttatgaaagccgttgaaattttgaggaataatactcatcttgcacttactgtgaagaccaacatttttgtgttcaaagagttactttttaggactgaacaagagaaatctggtgttcctcatattcccaaaattgctgaaaaaaaaagtaatcgccattctatccagcatgtgccaggagatattgaacagacatcacaggagaaaggaagtaagaaagttaaagcaaatactgtttcaggtggaagaaacaaaatcaggaagattttggataaaacacgatttagtatcttgcctccaaagctatttagtgatggaggcctaagccaatcacaagatgacagcattgtgggaacaaggcactgtaggcatagtctggctataatgcccatccctggaacactctcatccagcagccctgatctcctgcagcctaccaccagtatgttggatttttccaatccttcagatatccctgatcaagttataagagttttcaaagtggatcagcaaagttgctacattatcatcagtaaagacaccacagctaaagaagtagtttttcatgctgttcatgaatttggtttgaccggtgcatccgacacatattctctctgtgaagtttctgttactcctgagggtgtcataaaacagagaagacttccagatcagttctccaaattagctgatagaattcaactcaatggaaggtattacttaaaaaataacatggaaacagaaaccttatgttcagatgaagatgctcaagaactagttaaggaaagccagctatccatgctgcagctcagtaccattgaggtggccacccagctgtcaatgagggactttgatttgtttcgtaatattgaaccgactgagtacatcgatgacctttttaagttaaattccaaaacaggaaatactcatttgaagaggtttgaggacattgtaaaccaagagacattctgggttgcctcagaaattttaactgaagcaaatcagctcaaacgaatgaagattattaagcattttattaaaattgcacttcattgtcgagaatgtaagaacttcaattccatgtttgcaataataagtggcttgaacctggcatctgtagcaagactcagaggaacttgggaaaagttaccaagcaaatacgagaaacatcttcaagatctacaagacatttttgatccatctagaaacatggcaaagtatagaaatattcttagtagtcaaagtatgcagcctccaattattccactcttccctgttgtcaagaaagatatgacatttctacatgaaggaaatgactccaaagtagatggtttagtaaactttgagaagttaagaatgatttccaaggaaatccgccaagttgttcgaatgacttctgctaacatggacccagctatgatgtttcgacagaggtcactgagtcaaggaagcacaaattcaaacatgctggatgttcagggaggtgctcacaaaaaaagggcacgccgcagctctctgcttaatgccaagaagctatatgaggatgcccaaatggcaaggaaggtgaagcagtatctttccagtctcgatgtagagacagatgaggagaagttccagatgatgtcattacagtgggagcctgcatatggtaccttgaccaagaatttaagtgagaaaagatcagccaaatcatctgaaatgtctccagtgcctatgaggtcagctggccaaacaactaaagcccacttgcatcaaccccacagagtaagccaggtgcttcaggtgccagctgttaatttgcaccccatcaggaagaagggacaaacaaaagaccctgcactgaatacaagtttacctcagaaagttttaggaacaactgaagaaataagtggtaagaagcatacagaagacactatttctgtggcgtcatctttacattctagtcctcctgcatctcctcaaggctcccctcacaaaggttacacacttattccatcagctaaatctgacaacttgtctgactccagccatagtgagatttcttcacggtccagcatcgtgagcaattgttctgttgactccatgtctgcagctctacaggatgaacggtgttcctctcaggccctggcagtccctgaatccactggggcattggaaaagacagagcacgcttcagggataggagatcatagtcaacatggccctgggtggacactcttgaagccatctctaatcaagtgtttagctgtctcatcgtctgtgagcaatgaagagatttctcaagagcatatcattatagaagcagctgacagtggtcgtggaagttggacttcgtgttcaagcagctcccatgacaacttccaaagccttccaaacccaaaaagctgggattttttgaactcttacagacatacccatttggatgaccccattgctgaagttgaacccactgactctgagccctattcctgttctaaaagctgctctagaacttgtgggcagtgtaaaggaagcctagagagaaagagttggacctcctccagttctctgtctgacacgtatgaaccaaactatgggacagttaaacggagagtattggagagcaccccagctgagtcatctgaaggcttggaccccaaggatgccactgacccagtttataaaactgtcacttcaagtacagaaaagggcttgattgtgtactgtgtcacctcacccaagaaggacgataggtatagggagccacctcccactcctccaggatatttggggatttctttagcggacctaaaggaaggaccccacacacacctaaaacctccagattatagtgtggcagtgcagaggtcaaagatgatgcataacagcctctctagactgccaccagcttctctcagtagcaacctcgtggcctgtgttccatcgaagattgtaactcagcctcagaggcataatttgcagccattccatcctaaactaggagatgtgactgatgcagatagcgaagcagatgaaaatgaacaagtttcagcagtctagcctttggatgacctatttgaaaaccactgaaagtcgtggaggaatgggcaagaaccacctcatgattctgcaggccattgctaacgaacagctcattgctacaaccagtccagaggttttattccctctactccgagcaatgaaatagacctgagttatgcttcctttcatttaatttctgcagataaatagtttcctgagcaatggatgctatgcctggataccagtctccactttgcacgccggaactgccttgggaccacagttacagaaaaaatgtaaactcagagtgatccttgtgtatattgctatagatttttctttaacaagctattttaaagataatggcattattatttccaagccatagcttgggctgaaggacaaattgaaattgtctgccaataccaaggatattcttgtatatttgaaaaataacttattatttgaattgttgtggttttgtttgtatttgagagctcttgttagctgatattcatgtttgaggtcataaaattgtctctggtctgaccaaacagaagtcatctttacagaggtgatatgcttgatctacacagagatgtgacttgatctgtagcaccaatacaatgtaggtctcagtttgagagaaataggaagccctttgcagttgaggtgttaggaacctgctggtcatggtgtggaaggccaaatgaagctgccacagggtttcttgtcagtcctttgggaaatgggagggagtagtttggggaggagggtgggaaccctaatttccacagaatgaaattttgatgttaaatgacatgtatacaaattcttccttaagtgaaagttatgctgcatcgaattgtaactgaaagtatagatccaacaaatagagactgggttctagagagttctggtctatagaaacccaaaactaaaatctctcataactcaagtatggaatactttttttaaagaaattcttatcatgggtgttgtaataatgaagacgaatttgactttatgcagtgttctgcagcatgcctcccccacatctcatagcaccaggttgtgtctgacctgacataccctgcagctctcagctggctgcagtaacattttgtgggagaaagaggagctggagttacagaaatgattgtctcttggttctcagtttttagcccttgagaggacatacttttccagcctcatgggtatggcactcttaattaaaatttcagtggctgtttactggatgaggcagatttttcacatttttgccaattaaatatattttatatatagtaaggttaattttttcagtttttttaatgtaaaagcaagtgaaattttaataaacttctgtaatttcccaaaaaaaaaaaaaaaaaaa

SEQ ID NO: 53 - DNA, 2855 bp, Homo sapiens
gagtggcagttatatagaccggcggcggagcacgcgtgtgtgcggacgcagttgcgtgaggggtttgtactatcctcggtgctgtggtgcagagctagttcctctccagctcagccgcgtaggtttggacatatttgactcttttccccccaggttgaattgaccaaagcaatggtgatggagaagcctagtcccctgctggtcgggcgggaatttgtgagacagtattacacactgctgaaccaggccccagacatgctgcatagattttatggaaagaactcttcttatgtccatgggggattggattcaaatggaaagccagcagatgcagtctacggacagaaagaaatccacaggaaagtgatgtcacaaaacttcaccaactgccacaccaagattcgccatgttgatgctcatgccacgctaaatgatggtgtggtagtccaggtgatggggcttctctctaacaacaaccaggctttgaggagattcatgcaaacgtttgtccttgctcctgaggggtctgttgcaaataaattctatgttcacaatgatatcttcagataccaagatgaggtctttggtgggtttgtcactgagcctcaggaggagtctgaagaagaagtagaggaacctgaagaaagacagcaaacacctgaggtggtacctgatgattctggaactttctatgatcaggcagttgtcagtaatgacatggaagaacatttagaggagcctgttgctgaaccagagcctgatcctgaaccagaaccagaacaagaacctgtatctgaaatccaagaggaaaagcctgagccagtattagaagaaactgcccctgaggatgctcagaagagttcttctccagcacctgcagacatagctcagacagtacaggaagacttgaggacattttcttgggcatctgtgaccagtaagaatcttccacccagtggagctgttccagttactgggataccacctcatgttgttaaagtaccagcttcacagccccgtccagagtctaagcctgaatctcagattccaccacaaagacctcagcgggatcaaagagtgcgagaacaacgaataaatattcctccccaaaggggacccagaccaatccgtgaggctggtgagcaaggtgacattgaaccccgaagaatggtgagacaccctgacagtcaccaactcttcattggcaacctgcctcatgaagtggacaaatcagagcttaaagatttctttcaaagttatggaaacgtggtggagttgcgcattaacagtggtgggaaattacccaattttggttttgttgtgtttgatgattctgagcctgttcagaaagtccttagcaacaggcccatcatgttcagaggtgaggtccgtctgaatgtcgaagagaagaagactcgagctgccagggaaggcgaccgacgagataatcgccttcggggacctggaggccctcgaggtgggctgggtggtggaatgagaggccctccccgtggaggcatggtgcagaaaccaggatttggagtgggaagggggcttgcgccacggcagtgaatcttcatggatcttcatgcagccatacaaaccctggttccaacagaatggtgaattttcgacagcctttggtatcttggagtatgaccccagtctgttataaactgcttaagtttgtataattttactttttttgtgtgttaatggtgtgtgctccctctccctctcttccctttcctgacctttagtctttcacttccaattttgtggaatgatattttaggaataacggacttttaaagaagcaaaaaaaaagactgaatttccttgcttactttgcatatacagactggattttttttttttttttacagccatttccccaaaggaatgtcttgcatattactgacatttggtatgtttcattcattggaatatttcttattttctacgtgtttgaaaagcctgtaagaaatacaggatttgataatattttgaaggcaggaaaaacccaaattgtttcttctttgagagtcatgactaccttctggtgtggagaaattgccattggaaaatttgacaattttgattctcactggtatgtttaaaaactgaataaaaggaatagaatttttttttgataaaggatcacaaaacaattctaaaacctaactgtttttaccattgaaatttaaattgtgataataggttttaaatgtctagaatgcaactgataggcttttcttgaactgttagtttttttgaagtagttttttcatgtttaatttgtatttgtaaaaaaacaaaaagcaaaaaaattcccaaaacccagataacaaccagagcaaaactgttgtgccttctatttatctttgatttcagtcttggcaattgtttaaaaaaaaaatctagatttgttttattaggttcagagtatgtggggaattatagaatccctctttcatcactttgtgtatgtcttttgttaacatatttgttatgccttattctaaaattgagtctcaaactggaatgcctttgaagacagatgcttctatagaggttctttgacctaaatagttcagcatttgtatttttattctggtatctaatcagattcctaatcatagcccgtaagaaggaatgttactttaatattggactttgctcatgtgctcgtgtccgcatttttttttttcttaaaatcatagccatatggtaaattttctattttgttatggttctcttttattgatgggcatgcagtgggtgttacttggaaatggccaatttttattaaaatatttctggaagaaaatttaaaaaaaaaaaaaaaaaaaaaa

SEQ ID NO: 54 - DNA, 689 bp, Homo sapiens
  misc_feature (481)..(481): n is a, c, g, or t
gaagcaagaggaggtgtttaatgagttctggttcaacacagaggccgccaacggggtctagctatgagtctgtcctgggacccgttcccaccaggccccttgtgggcagtggccaccatccctccctcaggctgtcctggccctcaaggaccccatggcagggccttttccaccatggcctccactgtgctgccatctcttgggaacagggggtcatcccatcctcccaagaaacacttcctcaggcctggccccgatgggctcaggcacacctggcgacatcagaaatggggccctggagtccagaccacaggccagtagttttggggggacagctcctccacctcctccaccggcctatctggggggctctgggtgcccaggggagccgggcaccagtacgtgggtgagtacgtgggcccagcacagggacaggggcggggacagaaaggtcccttcgctgtcatggggctgtcacggngctgagcctggctcgaggaagccccgaatttcagcatgttccagtcaaagacgtagtcataggagaagccctgccggtggaagaggttgcgtaagagctgacgtacggtagagtagtccggcttgtcgtcaaaccgcagggagcggcagaagttgaggtatgttgagaatttcgagtgatagcctatgcagaggaccctgatgggcgt

SEQ ID NO: 55 - DNA, 3652 bp, Homo sapiens
attccttctcattcattttgcccagaaagttcctgcttcagagctgaaggtgattgggagattttaacttagatctccagcaagtgctacaaggaagaaaagatcctgaagaatcaatcaagttttccgtgaagtcaagtccaagtaacatccccgccttaaccacaagcaggagaaatgaagcacattatcaactcgtatgaaaacatcaacaacacagcaagaaataattccgactgtcctcgtgtggttttgccggaggagatatttttcacaatttccattgttggagttttggagaatctgatcgtcctgctggctgtgttcaagaataagaatctccaggcacccatgtactttttcatctgtagcttggccatatctgatatgctgggcagcctatataagatcttggaaaatatcctgatcatattgagaaacatgggctatctcaagccacgtggcagttttgaaaccacagccgatgacatcatcgactccctgtttgtcctctccctgcttggctccatcttcagcctgtctgtgattgctgcggaccgctacatcaccatcttccacgcactgcggtaccacagcatcgtgaccatgcgccgcactgtggtggtgcttacggtcatctggacgttctgcacggggactggcatcaccatggtgatcttctcccatcatgtgcccacagtgatcaccttcacgtcgctgttcccgctgatgctggtcttcatcctgtgcctctatgtgcacatgttcctgctggctcgatcccacaccaggaagatctccaccctccccagagccaacatgaaaggggccatcacactgaccatcctgctcggggtcttcatcttctgctgggccccctttgtgcttcatgtcctcttgatgacattctgcccaagtaacccctactgcgcctgctacatgtctctcttccaggtgaacggcatgttgatcatgtgcaatgccgtcattgaccccttcatatatgccttccggagcccagagctcagggacgcattcaaaaagatgatcttctgcagcaggtactggtagaatggctgatccctggttttagaatccatgggaataacgttgccaagtgccagaatagtgtaacattccaacaaatgccagtgctcctcactggccttccttccctaatggatgcaaggatgatcccaccagctagtgtttctaatagctaggttctatgtgaacagtcttattgtaggggcaacctcttaactttgtgactggacagataaaacgatgtagtaaaagaaggatagaatacaaagtattaggtaggtacaaaagtaattaaggtttttgccattactttcaatgaccaaaaattgcaattacttttgcaccaatctagtaaaacagcaataaaaattcaagggctttgggctaaggcaaagacttgctttcctgtggacatctaacaagccagttctgaggtggcctttccaggtggaggccattgcagccaatttccagaagttaagtacctggacatgcgactccaggcagaagatgtagggtctctgtaagccaataataaattggaaggaatgcattgctgcagctgaatttgtctgtctcccacagccatgtggaatctccaccctcctctttctccctgttagtctgatgtattgatgccacctcagtttcagaaagtaggctgagtataaactataaatgtcaaataacgagcttcgagtttccaatgataaatggaccttctctgttagtcttctttgctcactcagtatcccactggccttaaaaccctttcctgttacatttcctcatgctttatgagcatacatttcaaaggaagaaatgaaaatttaatccatttagttcccatgtgggaatacataaaggccagatgaaaattgtcactatttgaagaagctgtaaccaaactatgtgtgttacaatgtagaagtacaagaaaagagccccaacatgtattttaagaaataaagagagagagacagagacagacagagagagagagagagagagagagagagagtgtgtgtgtgtgtgtgtgtgtgtgtgtgtgtgtgtgtgtgtgtgtgtgtgtattttccccatgcttttggactatggggaaaaccaaaaccaaagcaagacatcaagcaatggtgctgttattatagccccaagtcaaagacctgagggaggcaaacaccacctcattctgcagatgaatgtgaaagcagacccagtcactgggaaatgtcatcctcccatcagccaagatgccagcaatggaagagtggcaaccccagtaggaataaaagaaacataatttgcaagttcattcatttttaatagctaaaaatcagcttaaaggagaagcacatcctgattgtaagtccccactaagttggagggtgacttgaatggggtgaaaggtgaaagggacagaggagagcagtggggcttcagaggccaccaggctcaggatctgcaggatggatggtatcttccagaacaggcaatgctttgccctcaggagaatttcccagagctgctgaggggagaagacagccacacacaggacagaccatttggtgatgggtttgatattagaagtggcagggacaggaacttcagaagcaaaggaggcaaggcagctggagtcaagtgaggacagtggcaggcgtgctttcacatggcctgtcccacagatggaggtgaaaggtgcaccttcttgtcctctgttctgtagaaatccttccctgtttgatccttcccctgccaaatgaactatgttactctaatactaacctgtattaattaatatatgagatatatataagttaatttttcatgaaatctaaagcacaaccctagaactaatttttaaaagtgttatttctaccattgaaaaagtaatgtataacatattttatgtgattaaagtgcgtattctcaataagaggtaacctttttttgatgctgcaatgctctgtgataccacagaggtaagcaatgccacttaacctgtatcataaatagtcccaaactgctcttcctataaaattctgcctttgtcaacagctttgctgtctcctaatcactctcaagctctctgctgtgcatgtgactgttgtcagaaggaaaatcaccaagaaacttcacctctcactgcctttgatttgttgcagttaatctaagaaacaaaatgaagatggctagtctaatggtggatgaaacaaaaatgaagtctgagtgctaattcagagaacttgcaattccagacattttcaattctaggtcttctgctatattccaatcagaacagaagcttcagggctcatagttactgagaaaactcacgtttttctacctctaacttcatatagaattccaaatgaaagcaccaccaaactgcacatatttgtgtgaggaagatcaacaagcttcagacttttcccatgaggacttaattcttttatcaaattacccaatttttaaactgctgtgtggatactgtgagtgttcagctttatcgatgacctagccttggaccagatagctgaaaatgttcaggatgtgtactcaagctgatagtaattctgagccctgtctaataaaaaaggaaggatgt

SEQ ID NO: 56 - DNA, 1384 bp, Homo sapiens
tttatttttgtatgtttgccttagctcatttccagattaaagaagagagcagtggcctcagctcagtgattaattacatgaactccttacgtggtattcgaccaatataagcccattaagagaaaggctgggttcttgttgtggcctactgaagactctctactctcatctcctgaagagcagtaagagagaccaatgacatggagtggcggaaccatagtgggagagtgagtgagtttgtgttgctgggcttccctgctcctgcgccactacaggtactattgtttgcccttttgctgctggcctatgtgttggtgctgactgagaacacactcatcattatggcaattaggaaccattctaccctccacaaacccatgtacttttttctagctaatatgtcctttctggagatctggtatgtcactgtcactattcccaagatgcttgctggctttgttggatccaaacaggatcatggacagctaatctcctttgagggatgcatgacacagctctactttttccttggcttgggctgcactgagtgtgtccttctcgctgttatggcctatgatcgctatatggccatctgctatcctctccactacccagtcattgtcagtggccggctgtgtgtgcagatggctgctggctcttgggctggaggttttggcatctccatggtcaaagtttttcttatttctggcctctcttactgtggccccaacatcatcaaccactttttctgtgatgtctctccattgctcaacctctcatgcactgatatgtccacagcagagcttacagatttcatcctggccatttttattcttctagggccactctctgtcactggggcctcctatgtggccattactggtgctgtgatgcacattccttcggctgctggacgctataaggccttttccacctgtgcctctcatctcactgttgtgataatcttctatgcagccagtatcttcatctatgctcggccaaaggcactctcagcttttgacaccaacaagttggtctctgtactgtatgctgtcattgtaccattgctcaatcccatcatttactgcctgcgcaatcaagaggtcaagagagccctatgctgtactctgcacctgtaccagcaccaggatcctgaccccaagaaagctagcagaaatgtatagaagggatgtgtgaaatctgataaaatgctattaaacttgggatcaatgtgttctatgaagtccagtggagttcttagggcctaaattgggggccagagtttcaaaggcatcactatggaactaggaatactttctttaactagtccaagaggagagagaggaataggttgcaagctagaaaatggatttctgcaggacag

SEQ ID NO: 57 - DNA, 859 bp, Homo sapiens
ggttgggcagggcaatacgcctgcgtgttgccggatgcgcatgcgcaggcgccgtgtggcactcggcggtcgaaaggggagttcaaggagacgggggcgacgcggctgagggcttctcgtcggggtcggggctgcagccgtcatgccggggatagtggagctgcccactctagaggagctgaaagtagatgaggtgaaaattagttctgctgtgcttaaagctgcggcccatcactatggagctcaatgtgataagcccaacaaggagtttatgctctgccgctgggaagagaaagatccgaggcggtgtttagaggaaggcaaactggtcaacaagtgtgctttggacttctttaggcagataaaacgtcactgtgcagagccttttacagaatattggacttgcattgattatactggccagcagttatttcgtcactgtcgcaaacagcaggcaaagtttgacgagtgtgtgctggacaaactgggctgggtgcggcctgacctgggagaactgtcaaaggtcaccaaagtgaaaacagatcgacctttaccggagaatccctatcactcaagaccaagaccggatcccagccctgagatcgagggagatctgcagcctgccacacatggcagccgcttttatttctggaccaagtaaagatgggtccgtggcccacactcggtcatgtgctcagacaacgactgatgaaaacgcccatgcggtttgcatcgactgatagtgtgttctttccgggatcacaaacattaacaaaaaagttaacttatgtgacttggcagttattctataccatttcctgtccattaaaatttttaaaggaaaaaaaaaaaaaaaaaa

SEQ ID NO: 58 - DNA, 2907 bp, Homo sapiens
ggaaccatggagctcagcgtcctcctcttccttgcactcctcacaggcctcttgctactcctggttcagcgtcaccctaactcccatggcaccctcccaccagggccccgccctctgccccttttggggaaccttctgcagatggacagaagaggcctactcaaatcctttctgaggttccgagagaaatatggggacgtcttcacggtacacctgggaccgaggcccgtggtcatgctgtgtggagtagaggccatacgggaggccctggtggacaacgctgaggccttctctggccggggaaaaatcgtcatcatggacccagtctaccagggatatggcatgctctttgccaatggaaaccgctggaaggtgcttcggcgattctctgtgaccaccatgagggacttcgggatgggaaagcggagtgtggaggagcggattcaggacgaggctcagtgtctgatagaggaacttcggaaatccaagggagccctcgtggaccccaccttcctcttccattccattaccgccaacatcatctgctccatcatctttggaaaacgcttccactaccaagatcaagagttcctgaagacgctgaacttgttctgccagagtttcttactcatcagctctatatccagccagctgtttgagctcttctctggcttcttgaaatactttcctggggcacacaggcaagtttacaaaaacctacaggaaatcaatgcttacattggccacagtgtggagaagcaccgtgaaaccctggaccccagcgcccccagggacctcatcgacacctacctgctccacatggaaaaagagaaatccaacccacacagtgaattcagccaccagaacctcatcatcaacacgctctcgctcttctttgctggcactgagaccaccagcaccactctccgctacggcttcctgctcatgctcaaataccctcatgtcgcagagagagtctacaaggagattgaacaggtggttggcccacatcgccctccagcgcttgatgaccgagccaaaatgccatacacagaggcagtcatccgtgagattcagagatttgctgaccttctccccatgggtgtgccccacattgtcacccaacacaccagcttctgagggtacaccatccccaaggacacggaagtatttctcatcctgagcactgctctccgtgacccacactactttgaaaaaccagacgccttcaatcctgaccactttctggatgccaatggggcactgaaaaagaatgaagcttttatccccttctccttagggaagcggatttgtcttggtgaaggcattgcccgtgcggaattgttcctcttcttcaccaccatcctccagaacttctccgtggccagccccgtggctcctgaagacatcgatctgacaccccaggagtgtggtgtgggcaaaatacccccaacataccagatctgcttcctgccccgctgaaggggctgagggaagggggtcaaaggattccagggtcattcagtgtccccacctctgtagataatggctctgactccctgcaacttcctgcctctgagagacctgctgcaagccagcttccttcccttccatggcaccagttgtctgaggtcgcagtgcaaatgagtggaggagtgagattattgaaaattataatatacaaaattatatatatatattttgagacagagtctcactcagttgcccaggctggagtgcagtggcgtgatctcggctcactgcaacctccacccccggggttcaagaaattctcctgcctcagcctccctagtagctgggattacaggtgtgtgctaccatgcctggctaatttttgtatttttagtagagatggggtttcaccgtgttggccaggctgatctcaaactcctgaactcaagtgattcacccaccttagcctcccaaagtgctgggattacaggtgtgagtcaccatgcccggccatgtatatatataattttaaaaattaagatgaaattcacataaaataaaattagccattttaaagtgtacaatttagtggtgtgtggttcattcacaaagctgtacaaccaccaccatctagttccaaacattttctttttttctgagacggagtctcactctgtcacccaggttcgagttcagtggtcttgaactcctgatgtcaggtgattctcctagttccaaatgttttcattatctctcccccaacaaaacccatacctatcaagctgtcactccccataccccattctctttttcatctcagcccctgtcaatctggtttttgtccttatggacttaccaattctgaatatttcctataaacagaatcacacaatatttgattttttttttaaaactaagccttgctctgtctcccaggctggagtgctgtggcgtgattttggttcactgcaacctccgccttccaagttcaagagattctcctgcctcagcttccaagtagctgggattacaggcatgtggtaccacgcctggctaattttcttgtatttttagtagggacatgttggccaggctggttgtgagctcctggcctcaggtgatccacacgcctcagtgtcccagagtgctgatattacaggcgtaatatgtgatcttttgtgtctggttcctttcacgttgaacgctatttttgaggttcgtgcctgttgtagaccacagtcacacactgctgtagtcttcccccatcctcattcccagctgcctcctcctactgtttccctctatcaaaaagcctccttggcgcaggttccctgagctgtgggattctgcactggtgctttggattccctgatatgttccttcaaatccactgagaattaaataaacatcgctaaagcctgacctccccacgtc

SEQ ID NO: 59 - DNA, 1472 bp, Homo sapiens
actgaggcgtggcgtctgctggggcacctgaaggagacttgggggcacccgcgtcgtgcctcctgggttgtgaggagtcgccgctgccgccactgcctgtgcttcatgaggaagatgctcgccgccgtctcccgcgtgctgtctggcgcttctcagaagccggcaagcagagtgctggtagcatcccgtaattttgcaaatgatgctacatttgaaattaagaaatgtgaccttcaccggctggaagaaggccctcctgtcacaacagtgctcaccagggaggatgggctcaaatactacaggatgatgcagactgtacgccgaatggagttgaaagcagatcagctgtataaacagaaaattattcgtggtttctgtcacttgtgtgatggtcaggaagcttgctgtgtgggcctggaggccggcatcaaccccacagaccatctcatcacagcctaccgggctcacggctttactttcacccggggcctttccgtccgagaaattctcgcagagcttacaggacgaaaaggaggttgtgctaaagggaaaggaggatcgatgcacatgtatgccaagaacttctacgggggcaatggcatcgtgggagcgcaggtgcccctgggcgctgggattgctctagcctgtaagtataatggaaaagatgaggtctgcctgactttatatggcgatggtgctgctaaccagggccagatattcgaagcttacaacatggcagctttgtggaaattaccttgtattttcatctgtgagaataatcgctatggaatgggaacgtctgttgagagagcggcagccagcactgattactacaagagaggcgatttcattcctgggctgagagtggatggaatggatatcctgtgcgtccgagaggcaacaaggtttgctgctgcctattgtagatctgggaaggggcccatcctgatggagctgcagacttaccgttaccacggacacagtatgagtgaccctggagtcagttaccgtacacgagaagaaattcaggaagtaagaagtaagagtgaccctattatgcttctcaaggacaggatggtgaacagcaatcttgccagtgtggaagaactaaaggaaattgatgtggaagtgaggaaggagattgaggatgctgcccagtttgccacggccgatcctgagccacctttggaagagctgggctaccacatctactccagcgacccaccttttgaagttcgtggtgccaatcagtggatcaagtttaagtcagtcagttaaggggaggagaaggagaggttataccttcagggggctaccagacagtgttctcaacttggttaaggaggaagaaaacccagtcaatgaaattcaatgaaattcttggaaacttccattaagtgtgtagattgagcaggtagtaattgcatgcagtttgtacattagtgcattaaaagatgaattattgagtgctt

SEQ ID NO: 60 - DNA, 256 bp, Homo sapiens
acacctgcctctacgagtgctcccccaacttggggccctggatccagcaggtggatcagagctggcgcaaagagcgggtactgaacgtgcccctgtgcaaagaggactgtgagcaatggtgggaagattgtcgcacctcctacacctgcaagagcaactggcacaagggctgcaactggacttcagggtttaacaagtgcgcagtgggagctgcctgccaacctttccatttctacttccccacacccattgcccg

SEQ ID NO: 61 - DNA, 445 bp, Homo sapiens
actgctgattacaatttattatttcttttcatccaccatccactcctcaaattatacgcccagacctgcccaacactgtcttatgttcaggattggcatcacagaggtacacagttccactggttccagcttctgggaatgggaacatgttgcagtgtgtaactcattttttgcatagcttcattgctgtagtctacatgagaatagacaggaaacccaagtttgcccaatttctgggcgtgggaatagatgacatacgtcacaaggccatggagccggtattccggcaaggtgcctgccattctcatctctccagtctggtccattagatcccagcacacaggggtcccctcaggccccaggagacagcaggtgggaaaggtctgaatgcagcgctcaatgaatctctggctcctctcattaccaccaaaatgccagaatttat

SEQ ID NO: 62 - DNA, 1748 bp, Homo sapiens
gctaccaccatgctggcctcagggatgcttctggtggccttgctggtctgcctgactgtgatggtcttgatgtctgtttggcagcagaggaagagcaaggggaagctgcctccgggacccaccccattgcccttcattggaaactacctgcagctgaacacagagcagatgtacaactccctcatgaagatcagtgagcgctatggccccgtgttcaccattcacttggggccccggcgggtcgtggtgctgtgtggacatgatgccgtcagggaggctctggtggaccaggctgaggagttcagcgggcgaggcgagcaagccaccttcgactgggtcttcaaaggctatggcgtggtattcagcaacggggagcgcgccaagcagctccggcgcttctccatcgccaccctgcgggacttcggggtgggcaagcgaggcatcgaggagcgcatccaggaggaggcgggcttcctcatcgacgccctccggggcactggcggcgccaatatcgatcccaccttcttcctgagccgcacagtctccaatgtcatcagctccattgtctttggggaccgctttgactataaggacaaagagttcctgtcactgttgcgcatgatgctaggaatcttccagttcacgtcaacctccacggggcagctctatgagatgttctcttcggtgatgaaacacctgccaggaccacagcaacaggcctttcagttgctgcaagggctggaggacttcatagccaagaaggtggagcacaaccagcgcacgctggatcccaattccccacgggacttcattgactcctttctcatccgcatgcaggaggaggagaagaaccccaacacggagttctacttgaaaaacctggtgatgaccacgttgaacctcttcattgggggcaccgagaccgtcagcaccaccctgcgctatggcttcttgctgctcatgaagcacccagaggtggaggccaaggtccatgaggagattgacagagtgatcggcaagaaccggcagcccaagtttgaggaccgggccaagatgccctacatggaggcagtgatccacgagatccaaagatttggagacgtgatccccatgagtttggcccgcagagtcaaaaaggacaccaagtttcgggatttcttcctccctaagggcaccgaagtgtaccctatgctgggctctgtgctgagagaccccagtttcttctccaacccccaggacttcaatccccagcacttcctgaatgagaaggggcagtttaagaagagtgatgcttttgtgcccttttccatcggaaagcggaactgtttcggagaaggcctggccagaatggagctctttctcttcttcaccaccgtcatgcagaacttccgcctcaagtcctcccagtcacctaaggacattgacgtgtcccccaaacacgtgggctttgccacgatcccacgaaactacaccatgagcttcctgccccgctgagcgagggctgtgccggtgcaggtctggtgggcggggccagggaaagggcagggccaagaccgggcttgggagaggggcgcagctaagactgggggcaggatggcggaaaggaaggggcgtggtggctagagggaagagaagaaacagaaggggctcagttcaccttgataaggtgcttccgagctgggatgagaggaaggaaacccttacattatgctatgaagagtagtaataatagcagctcttatttcctg

SEQ ID NO: 63 - DNA, 1453 bp, Homo sapiens
agcgcgagtgccagagcccagccggcgcggagcgggagcggtgcaggctgaggtctccgagcggctcgccatggctggcccgcagcagcagcccccttacctgcacctggccgagctgacggcgtcccagttcctggaaatatggaagcactttgacgcagacggaaatgggtatattgaaggtaaagagctagaaaactttttccaagagctggagaaggcaaggaaaggctctggcatgatgtcaaagagtgacaactttggagaaaagatgaaggagttcatgcagaagtatgataaaaactcagatgggaaaatcgagatggcagagctggcgcagatcctgccaaccgaagagaacttccttctgtgcttcaggcagcacgtgggctccagcgccgagtttatggaggcttggcggaagtacgacacagacaggagtggctacatcgaagccaatgagctcaagggattcctgtcagacctgctgaagaaggcgaaccggccgtacgatgagcccaagctccaggaatacacccaaaccatactacggatgtttgacttgaacggggatggcaaattgggcctctcagagatgtcccgactcctgcctgtccaggaaaacttcctgcttaaatttcagggcatgaagctgacctcagaggagtttaacgcgatcttcacattttacgacaaggatagaagcggctacattgacgagcatgagctggatgcccttttgaaggatctgtacgagaaaaacaaaaaggaaatcaatattcaacagctcaccaactacagaaagagcgtcatgtccttggcagaggcagggaagctctaccgcaaggacctggagattgtgctctgcagcgagccccccatgtaaagtggggacgggggctgcttctccacctcccccaaaccctgcttctgctgccctgatgcgtctacccagactcagagaccgtgagcgccccgcccccacccctacagcctgcacacacctgcctgcagagcaggaaacgagagatagaggatgggcagctggggggctgtcctgagccccctgcacccacccctgcccaggcagtctttgctcagtggatcacacacatggaaggtgatgggggcatgggtggagggtccctaattctcttcgctgtgatgcatgagctccctcgctgtatgatttaggcttctatgtccaacagagtggactcttccctctcgctcccctctgccggtcccccatgccaccacccaccccaaacttccaggttccatccaccaccttgccaatggtgtagctgtcctctcagaactcctgtgtgtggaaggcacccgccctttccttgccttctttactcggcgtgctccttttctctttgggtttcttgtttaccaaagaagagtttacagacaataaaatggaaaggtcctgctgtggaaactt

SEQ ID NO: 64 - DNA, 599 bp, Homo sapiens
tctcctgccacagctcctcaccccctgaaaatgttcgcctgctccaagtttgtctccactccctccttggtcaagagcacctcacagctgctgagccgtccgctatctgcagtggtgctgaaacgaccggagatactgacagatgagagcctcagcagcttggcagtctcatgtccccttacctcacttgtctctagccgcagcttccaaaccagcgccatttcaagggacatcgacacagcagccaagttcattggagctggggctgccacagttggggtggctggttctggggctgggattggaactgtgtttgggagcctcatcattggttatgccaggaacccttctctgaagcaacagctcttctcctacgccattctgggctttgccctctcggaggccatggggctcttttgtctgatggtagcctttctcatcctctttgccatgtgaaggagccgtctccacctcccatagttctcccgcgtctggttggccccgtgtgttccttttcctatacctccccaggcagcctggggaacgtggttggctcagggtttgacagagaaaagacaaataaatactgtattaataag

SEQ ID NO: 65 - DNA, 623 bp, Homo sapiens
ttttttaagtctgttttcctttttattttataaatgtattttattttatacttgtttaatccatcttagacctagcacatcctagggttttatatactgatcaaattgctctgctagagatgcttaagttcaatagcagtttcctttcaaacttatccgtttttaagaaatgggagtctgtttttttaaattttatacatgtttattttcattataaatttatgtaaatcactttggacccagcatgtccttaggttttacccattcgtcaaactgctctgctgtgagatagccaagttcgatagcagtttccgttaaggttgatccatttttgtgtgctgtcttagcaatctttgctgccttgtcataccctatatggggattgagagctgtcaccaacattagagactcattcatcagcttgttgatcctttctgtattggcctggattcccaccacgcagttttctgtaaaggaaactgaagcatcccccagcagcctggctgagtgtaacacatttttagtcatcattggcttgagaacattcatctccaaatgtccattgctgccctcgacagtgacagcaacatggttcccatgactgtgctgcaccatgtcattgc

SEQ ID NO: 66 - DNA, 1791 bp, Homo sapiens
cccagaaattctacccaagctccctcagcaccatgtaccgagcacttcggctcctcgcgcgctcgcgtcccctcgtgcgggctccagccgcagccttagcttcggctcccggcttgggtggcgcggccgtgccctcgttttggcctccgaacgcggctcgaatggcaagccaaaattccttccggatagaatatgatacctttggtgaactaaaggtgccaaatgataagtattatggcgcccagaccgtgagatctacgatgaactttaagattggaggtgtgacagaacgcatgccaaccccagttattaaagcttttggcatcttgaagcgagcggccgctgaagtaaaccaggattatggtcttgatccaaagattgctaatgcaataatgaaggcagcagatgaggtagctgaaggtaaattaaatgatcattttcctctcgtggtatggcagactggatcaggaactcagacaaatatgaatgtaaatgaagtcattagcaatagagcaattgaaatgttaggaggtgaacttggcagcaagatacctgtgcatcccaacgatcatgttaataaaagccagagctcaaatgatacttttcccacagcaatgcacattgctgctgcaatagaagttcatgaagtactgttaccaggactacagaagttacatgatgctcttgatgcaaaatccaaagagtttgcacagatcatcaagattggacgtactcatactcaggatgctgttccacttactcttgggcaggaatttagtggttatgttcaacaagtaaaatatgcaatgacaagaataaaagctgccatgccaagaatctatgagctcgcagctggaggcactgctgttggtacaggtttaaatactagaattggctttgcagaaaaggttgctgcaaaagtggctgcacttacaggcttgccttttgtcactgctccgaataaatttgaagctctggctgctcatgacgctctggttgagctcagtggagccatgaacactactgcctgcagtctgatgaagatagcaaatgatattcgatttttgggttctggtcctcggtcaggtctgggagaattgatcttgcctgaaaatgaaccaggaagcagtatcatgccaggcaaggtgaaccctactcagtgtgaagcaatgaccatggttgcagcccaagtcatggggaaccatgttgctgtcactgtcggaggcagcaatggacattttgagttgaatgttttcaagccaatgatgattaaaaatgtgttacactcagccaggctgctgggggatgcttcagtttcctttacagaaaactgcgtggtgggaatccaggccaatacagaaaggatcaacaagctgatgaatgagtctctaatgttggtgacagctctcaatcctcatatagggtatgacaaggcagcaaagattgctaagacagcacacaaaaatggatcaaccttaaaggaaactgctatcgaacttggctatctcacagcagagcagtttgacgaatgggtaaaacctaaggacatgctgggtccaaagtgatttacataaatttataatgaaaataaacatgtataaaatttaaaaaaacagactcccatttcttaaaaacggataagtttgaaaggaaactgctattgaacttaagcatctctagcagagcaatttgatcagtatataaaaccctaggatgtgctaggtctaagatggattaaacaagtataaaataaaatacatttataaaataaaaaggaaaacagacttaaaa

SEQ ID NO: 67 - DNA, 631 bp, Homo sapiens
atcctggcgtttgcctgcagcaagatggcggcggtctcaatgtcagtggtactgaggcagacgttgtggcggagaagggcagtggctgtagctgccctttccgtttccagggttccgaccaggtcgttgaggacttcctcatggagattggcacaggaccagactcaagacacacaactcataacagttgatgaaaaattggatatcactactttaactggcgttccagaagagcatataaaaactagaaaagtcaggatctttgttcctgctcgcaataacatgcagtctggagtaaacaacacaaagaaatggaagatggagtttgataccagggagcgatgggaaaatcctttgatgggttgggcatcaacggctgatcccttatccaacatggttctaaccttcagtactaaagaagatgcagtttcctttgcagaaaaaaatggatggagctatgacattgaagagaggaaggttccaaaacccaagtccaagtcttatggtgcaaacttttcttggaacaaaagaacaagagtatccacaaaataggttggcactgactatatctctgcttgactgtgaataaagtcagctatgcaaaaaaaaaaaaaaaaaaaaaaaaaaaaaa

SEQ ID NO: 68 - DNA, 1092 bp, Homo sapiens
ccctgagcagaaggctctggtgattggtggagaggcttgtatgtggggagaatatgtggacaacacaaacctggtccccaggctctgctaagggttttcgggggggaggtggagggttgggcctgagagcaggagttctcccttagagacccaatcccatctagccacctctggactagtacccttctttcaggcctgagagagagcaggccgtgcaacgagccttctgaagatttgtgtgcaatattcactctccacatgacttccgtctatatccctccagctgccctttggtatgtgggatagggattgttaaccttacttcccagagagataatgaggcctggagaacataggtgagttgctcaagacccagcacaagcatccatgattcctgtaataaggcttccctctgctgttttcactgcagccttaccaagtatggttgggtgtgcaaagtttacattttaaggacctctgctgctgccactgtcattgtggttaatgatggctttaaggtttattcttattcccgtatctttgagagaggaagagagtgggattgctacccacattttaatgaaggtggagctgagccgtagaactctctgggagccatccaacctggctgtggctcataacaaggtattgatcacttcctttggcctgagtgagtccagggtgcctagacaagaggtagcagcctgtggatgtccagcacctttgcagggaatacagggcccaatctggcacatgccccttttcctccaggcccagagcaggggctgttgccgaaaggctgtggagcaacaagttgacatctgacctgacatttgcctatgaacgtttgtcacacttccgctgtgagttgctgaggtaagcaagctgtggggccttcgcaaggcggagcaggccagatccagggctggggaaccccttagagagaggaagacaataattaacaatagctaacacttacagaggcttatagtcagccctcatccacggattcaaccaactgcgataaaaagtattcaggaaaaaaaaaatacaacaaaaaatggtacaaataaaaaatactgtataacaact

SEQ ID NO: 69 - DNA, 1268 bp, Homo sapiens
ctgactctctgaggctcattttgcagttgttgaaattgtccccgcagttttcaatcatgtctgaaccaatcagagtccttgtgactggagcagctggtcaaattgcatattcactgctgtacagtattggaaatggatctgtctttggtaaagatcagcctataattcttgtgctgttggatatcacccccatgatgggtgtcctggacggtgtcctaatggaactgcaagactgtgcccttcccctcctgaaagatgtcatcgcaacagataaagaagacgttgccttcaaagacctggatgtggccattcttgtgggctccatgccaagaagggaaggcatggagagaaaagatttactgaaagcaaatgtgaaaatcttcaaatcccagggtgcagccttagataaatacgccaagaagtcagttaaggttattgttgtgggtaatccagccaataccaactgcctgactgcttccaagtcagctccatccatccccaaggagaacttcagttgcttgactcgtttggatcacaaccgagctaaagctcaaattgctcttaaacttggtgtgactgctaatgatgtaaagaatgtcattatctggggaaaccattcctcgactcagtatccagatgtcaaccatgccaaggtgaaattgcaaggaaaggaagttggtgtttatgaagctctgaaagatgacagctggctcaagggagaatttgtcacgactgtgcagcagcgtggcgctgctgtcatcaaggctcgaaaactatccagtgccatgtctgctgcaaaagccatctgtgaccacgtcagggacatctggtttggaaccccagagggagagtttgtgtccatgggtgttatctctgatggcaactcctatggtgttcctgatgatctgctctactcattccctgttgtaatcaagaataagacctggaagtttgttgaaggtctccctattaatgatttctcacgtgagaagatggatcttactgcaaaggaactgacagaagaaaaagaaagtgcttttgaatttctttcctctgcctgactagacaatgatgttactaaatgcttcaaagctgaagaatctaaatgtcgtctttgactcaagtaccaaataataataatgctatacttaaattacttgtgaaaaacaacacattttaaagattacgtgcttcttggtacaggtttgtgaatgacagtttatcgtcatgctgttagtgtgcattctaaataaatatatattcaaatg

SEQ ID NO: 70 - DNA, 1595 bp, Homo sapiens
gcgccccgggcgggcacagttacgcgccgcacggatcatggccgcagccgctctggggcagatctgggcacgaaagcttctctctgtcccttggcttctgtgtggtcccagaagatatgcctcctccagtttcaaggctgcagacctgcagctggaaatgacacagaagcctcataagaagcctggccccggcgagcccctggtgtttgggaagacatttaccgaccacatgctgatggtggaatggaatgacaagggctggggccagccccgaatccagcccttccagaacctcacgctgcacccagcctcctccagcctccactactccctgcagctgtttgagggcatgaaggcgttcaaaggcaaagaccagcaggtgcgcctcttccgcccctggctcaacatggaccggatgctgcgctcagccatgcgcctgtgcctgccgagtttcgacaagctggagttgctggagtgcatccgccggctcatcgaagtggacaaggactgggtccccgatgccgccggcaccagcctctatgtgcggcctgtgctcattgggaacgagccctcgctgggtgtcagccagcccacgcgcgcgctcctgttcgtcattctctgcccagtgggtgcctacttccctggaggctccgtgaccccggtctccctcctggccgacccagccttcatccgggcctgggtgggcggggtcggcaactacaagttaggtgggaattatgggcccaccgtgttagtgcaacaggaggcactcaagcggggctgtgaacaggtcctctggctgtatgggcccgaccaccagctcaccgaggtgggaaccatgaacatctttgtctactggacccacgaagatggggtgctggagctggtgacgcccccgctgaatggtgttatcctgcctggagtggtcagacagagtctactggacatggctcagacctggggtgagttccgggtggtggagcgcacgatcaccatgaagcagttgctgcgggccctggaggagggccgcgtgcgggaagtctttggctcgggcaccgcttgccaggtctgcccagtgcaccgaatcctgtacaaagacaggaacctccacattcccaccatggaaaatgggcctgagctgatcctccgcttccagaaggagctgaaggagatccagtacggaatcagagcccacgagtggatgttcccggtgtgaagctgcaggctgtgctccagatccaccgacccgtagcatctcgtcacgccagcactcgcctccctaccaatgactcacctgaagtgcaatacgaaataaaaggccagcgggcggcgtctgggtctctggcgcccccatgtggttgcgacactcccaaagccgtaagggccgacccaggcatcttggcccccagcccctcgtcgcgggttcaggtccgcccattactccttgtcgtgcggtcaaggatacaccttggccccgattccggatctctccgttctcaggccagacccctggtgctgccgttgatttttttttctctgtctttgctgcaattttgaaataaaatgccaaagaacacacaaaaaaaaaaaaaaaa

SEQ ID NO: 71 - DNA, 1584 bp, Homo sapiens
atggctgacagccgggatcccgccagcgaccagatgcagcactggaaggagcagcgggccgcgcagaaagctgatgtcctgaccactggagctggtaacccagtaggagacaaacttaatgttattacagtagggccccgtgggccccttcttgttcagaatgtggttttcactgatgaaatggctcattttgaccgagagagaattcctgagagagttgtgcatgctaaaggagcaggggcctttggctactttgaggtcacacatgacattaccaaatactccaaggcaaaggtatttgagcatattggaaagaagactcccatcgcagttcggttctccactgttgctggagaatcgggttcagctgacacagttcgggaccctcgtgggtttgcagtgaaattttacacagaagatggtaactgggatctcgttggaaataacacccccattttcttcatcagggatcccatattgtttccatcttttatccacagccaaaagagaaatcctcagacacatctgaaggatccggacatggtctgggacttctggagcctacgtcctgagtctctgcatcaggtttctttcttgttcagtgatcgggggattccagatggacatcgccacatgaatggatatggatcacatactttcaagctggttaatgcaaatggggaggcagtttattgcaaattccattataagactggccagggcatcaaaaacctttctgttgaagatgcggcgagactttcccaggaagatcctgactatggcatccgggatctttttaacgccattgccacaggaaaggacccctcctggactttttacatccaggtcatgacatttaatcaggcagaaacttttccatttaatccattcgatctcaccagggtttggcctcacaaggactaccctctcatcccagttggtaaactggtcttaaaccggaatccagttaattactttgctgaggttgaacagatagccttcgacccaagcaacatgccacctggcattgaggccagtcctgacaaaatgcttcagggccgcctttttgcctatcctgacactcaccgccatcgcctgggacccaattatcttcatatacctgtgaactgtccctaccgtgctcgagtggccaactaccagcgtgacggcccgatgtgcatgcaggacaatcagggtggtgctccaaattactaccccaacagctttggtgctccggaacaacagccttctgccctggagcacagcatccaatattctggagaagtgcggagattcaacactgccaatgatgataacgttactcaggtgcgggcattctatgtgaacgtgctgaatgaggaacagaggaaacgtctgtgtgagaacattgccggccacctgaaggatgcacaaattttcatccagaagaaagcggtcaagaacttcactgaggtccaccctgactacgggagccacatccaggctcttctggacaagtacaatgctgagaagcctaagaatgcgattcacacctttgtgcggtccggatctcacttggtggcaagggagaaggcaaatctgtga

SEQ ID NO: 72 - DNA, 1161 bp, Homo sapiens
acccgggaaaccggaagccgcctcccacttggttgctcgtacgcggctagtgggtcctcagtggatgtaggctgggcgccgcgatgttcgacgggacaccggcggagagcgacctcggggttaaggggtggggctgacgtcaggagccaagatggcggcggtggtcgccctctccttgaggcgccggttgccggccacaacccttggcggagcctgcctgcaggcctcccgaggagcccagacagctgcagccacagctccccgtatcaagaaatttgccatctatcgatgggacccagacaaggctggagacaaacctcatatgcagacttatgaagttgaccttaataaatgtggccccatggtattggatgctttaatcaagattaagaatgaagttgactctactttgaccttccgaagatcatgcagagaaggcatctgtggctcttgtgcaatgaacatcaatggaggcaacactctagcttgcacccgaaggattgacaccaacctcaataaggtctcaaaaatctaccctcttccacacatgtatgtgataaaggatcttgttcccgatttgagcaacttctatgcacagtacaaatccattgagccttatttgaagaagaaggatgaatctcaggaaggcaagcagcagtatctgcagtccatagaagagcgtgagaaactggacgggctctacgagtgcattctctgtgcctgctgtagcaccagctgccccagctactggtggaacggagacaaatatctggggcctgcagttcttatgcaggcctatcgctggatgattgactccagagatgacttcacagaggagcgcctggccaagctgcaggacccattctctctataccgctgccacaccatcatgaactgcacaaggacctgtcctaagggtctgaatccagggaaagctattgcagagatcaagaaaatgatggcaacctataaggagaagaaagcttcagtttaactgtttccatgctaaacatgatttataaccagctcagagctgaacataatttatatctaatttgagttcctttaaagatcttggttttccatgaatacagcatgtataataaaaattttaagaaataaatgttattctactttattaacaaaaaaaaaaaaaaaaaa

SEQ ID NO: 73 - DNA, 1306 bp, Homo sapiens
ggccatgaggttgatcctgttttttggtgccctttttgggcatatctactgtctagaaacatttgtgggagaccaagttcttgagattgtaccaagcaatgaagaacaaattaaaaatctgctacaattggaggctcaagaacatctccagcttgatttttggaaatcacccaccaccccaggggagacagcccacgtccgagttcccttcgtcaacgtccaggcagtcaaagtgttcttggagtcccagggaattgcctattccatcatgattgaagacgtgcaggtcctgttggacaaagagaatgaagaaatgctttttaataggagaagagaacggagtggtaacttcaattttggggcctaccataccctggaagagatttcccaagaaatggataacctcgtggctgagcaccctggtctagtgagcaaagtgaatattggctcttcttttgagaaccggcctatgaacgtgctcaagttcagcaccggaggagacaagccagctatctggctggatgctgggatccatgctcgagagtgggttacacaagctacggcactttggacagcaaataagattgtttctgattatggaaaggacccatccatcacttccattctggacgccctggatatcttcctcctgccagtcacaaaccctgatggatacgtgttctctcaaaccaaaaatcgtatgtggcggaagacccggtccaaggtatctggaagcctctgtgttggtgtggatcctaaccggaactgggatgcaggttttggaggacctggagccagcagcaacccttgctctgattcataccacggacccagtgccaactctgaagttgaagtgaaatccatagtggacttcatcaagagtcatggaaaagtcaaggccttcattatcctccacagctattcccagctgctgatgttcccctatgggtacaaatgtaccaagttagatgactttgatgagctgagtgaagtggcccaaaaggctgcccaatctctgagaagcctgcatggcaccaagtacaaagtgggaccaatctgctctgtcatctaccaagccagtggaggaagcattgactggtcctatgattatggcatcaagtactcatttgcctttgaactgagagacacagggcgctacggcttcctcttgccagcccgtcagatcctgcccacagccgaggagacctggcttggcttgaaggcaatcatggagcatgtgcgagaccacccctattagggccctggggaagaaacaagagccattaaaatctctttggtttgaagc

SEQ ID NO: 74 - DNA, 541 bp, Homo sapiens
gcacttcctgaagctgaaggtcagcatagacaaagggcctcagaatcgcgcaggcgcaattgtgccctggttcgccaagatgtcgttcccaaagtataagccgtcgagcctgcgcactctgcctgagaccctcgacccagccgaatacaacatatctccggaaacccggcgggcgcaagccgagcggttggccataagagcccagctgaaacgagagtacctgcttcagtacaacgatcccaaccgccgagggctcatcgaaaatcctgccttgcttcgttgggcctatgcaagaacaataaatgtctatcctaatttcagacccactcctaaaaactcactcatgggagctctgtgtggatttgggcccctcatcttcatttattatattatcaaaactgagagggataggaaagaaaaacttatccaggaaggaaaattggatcgaacatttcacctctcatattaagtctggcaatgatgactatatgtattcctgcctaaataaatcatctattaatcattaaaaaaaaaaaaaaaa

SEQ ID NO: 75 - DNA, 1025 bp, Homo sapiens
cggggtgggattccaacccagaagcgggcatttggagccctcatgcttcaccctagctccctgaaacaagcacggaggatggctctgagcagcgaggaaagtgctggaagcaagcaggccgagcgcgtccctggctggggacgttaatcattaccggagggcggcccgagcgcggccccgccccgggacggcagcctgcgcgcccggccgccgcctgccctctccgctggccacctgctgccgcccgcgccatggctggcaaagcacacaggctgagcgctgaggagagggaccagctgctgccaaacctgagggctgtggggtggaatgagctggaaggccgtgatgccatcttcaagcagtttcatttcaaagacttcaacagggcctttgggttcatgacaagagtggccctgcaggctgagaaactggaccaccatcctgaatggtttaacgtgtacaacaaggtccacatcacgctgagcacccatgagtgtgccggcctttcagaacgggacataaacctggccagcttcatcgaacaagtagcagtgtccatgacatagaccctgcccttcctctttgaattcttccgggggaaggggtgactgaactgggagtccagggagggagctgaggagcccttaccctcccaccactcccctcccaagacccagccgccgccgttgagggctgagtccttgctgtgggatgtgccagtgtccccaccaacaccaggaatttagaccttttccctgcaccactctcttcatcctgggggctctgttacactaatttgaataaactctcccctttctttgcaacttcccagcaacaataatgattttcttgccaggccgtctcttgctccctaattcatttcccaggaagctgtgatacagggtgaaataaagtcttgtcttagaaaccaggaccctaaaccccacactatgtaatagaaacacatgtgtttttatgtctcaaataaaactattatatcacttggaaaaaaaaaaaaaaaaaaa

SEQ ID NO: 76 - DNA, 2457 bp, Homo sapiens
acccgccctcgccgctcggccccgcgcgtccccgcgcgtgccctcctcccgccacacggcacgcacgcgcgcgcagggccaagccgaggcagccgcccgcagctcgcactcgctggcgacctgctccagtctccaaagccgatggcatctccgggctctggcttttggtctttcgggtcggaagatggctctggggattccgagaatcccggcacagcgcgagcctggtgccaagtggctcagaagttcacgggcggcatcggaaacaaactgtgcgccctgctctacggagacgccgagaagccggcggagagcggcgggagccaacccccgcgggccgccgcccggaaggccgcctgcgcctgcgaccagaagccctgcagctgctccaaagtggatgtcaactacgcgtttctccatgcaacagacctgctgccggcgtgtgatggagaaaggcccactttggcgtttctgcaagatgttatgaacattttacttcagtatgtggtgaaaagtttcgatagatcaaccaaagtgattgatttccattatcctaatgagcttctccaagaatataattgggaattggcagaccaaccacaaaatttggaggaaattttgatgcattgccaaacaactctaaaatatgcaattaaaacagggcatcctagatacttcaatcaactttctactggtttggatatggttggattagcagcagactggctgacatcaacagcaaatactaacatgttcacctatgaaattgctccagtatttgtgcttttggaatatgtcacactaaagaaaatgagagaaatcattggctggccagggggctctggcgatgggatattttctcccggtggcgccatatctaacatgtatgccatgatgatcgcacgctttaagatgttcccagaagtcaaggagaaaggaatggctgctcttcccaggctcattgccttcacgtctgaacatagtcatttttctctcaagaagggagctgcagccttagggattggaacagacagcgtgattctgattaaatgtgatgagagagggaaaatgattccatctgatcttgaaagaaggattcttgaagccaaacagaaagggtttgttcctttcctcgtgagtgccacagctggaaccaccgtgtacggagcatttgaccccctcttagctgtcgctgacatttgcaaaaagtataagatctggatgcatgtggatgcagcttggggtgggggattactgatgtcccgaaaacacaagtggaaactgagtggcgtggagagggccaactctgtgacgtggaatccacacaagatgatgggagtccctttgcagtgctctgctctcctggttagagaagagggattgatgcagaattgcaaccaaatgcatgcctcctacctctttcagcaagataaacattatgacctgtcctatgacactggagacaaggccttacagtgcggacgccacgttgatgtttttaaactatggctgatgtggagggcaaaggggactaccgggtttgaagcgcatgttgataaatgtttggagttggcagagtatttatacaacatcataaaaaaccgagaaggatatgagatggtgtttgatgggaagcctcagcacacaaatgtctgcttctggtacattcctccaagcttgcgtactctggaagacaatgaagagagaatgagtcgcctctcgaaggtggctccagtgattaaagccagaatgatggagtatggaaccacaatggtcagctaccaacccttgggagacaaggtcaatttcttccgcatggtcatctcaaacccagcggcaactcaccaagacattgacttcctgattgaagaaatagaacgccttggacaagatttataataaccttgctcaccaagctgttccacttctctagagaacatgccctcagctaagccccctactgagaaacttcctttgagaattgtgcgacttcacaaaatgcaaggtgaacaccactttgtctctgagaacagacgttaccaattatggagtgtcaccagctgccaaaatcgtaggtgttggctctgctggtcactggagtagttgctactcttcagaatatggacaaagaaggcacaggtgtaaatatagtagcaggatgaggaacctcaaactgggtatcatttgcacgtgctcttctgttctcaaatgctaaatgcaaacactgtgtatttattagttaggtgtgccaaactaccgttcccaaattggtgtttctgaatgacatcaacattcccccaacattactccattactaaagacagaaaaaaataaaaacataaaatatacaaacatgtggcaacctgttcttcctaccaaatataaacttgtgtatgatccaagtattttatctgtgttgtctctctaaacccaaataaatgtgtaaatgtggacaca

SEQ ID NO: 77 - DNA, 1349 bp, Homo sapiens
atggatctcattccaaactttgccatggaaacatgggttcttgtggctaccagcctggtactcctctatatttatgggacccattcacataaactttttaagaagctgggaattcctgggccaacccctctgccttttctgggaactattttgttctaccttaggggtctttggaattttgacagagaatgtaatgaaaaatacggagaaatgtgggggctgtatgaggggcaacagcccatgctggtcatcatggatcccgacatgatcaaaacagtgttagtgaaagaatgttactctgtcttcacaaaccagatgcctttaggtccaatgggatttctgaaaagtgccttaagttttgctgaagatgaagaatggaagagaatacgaacattgctatctccagctttcaccagtgtaaaattcaaggaaatggtccccatcatttcccaatgtggagatatgttggtgagaagcctgaggcaggaagcagagaacagcaagtccatcaacttgaaagatttctttggggcctacaccatggatgtaatcactggcacattatttggagtgaacttggattctctcaacaatccacaagatccctttctgaagaatatgaagaagcttttaaaattggattttttggatccctttttactcttaatatcactctttccatttcttaccccagtttttgaagccctaaatatcggtttgtttccaaaagatgttacccattttttaaaaaattccattgaaaggatgaaagaaagtcgcctcaaagataaacaaaagcatcgagtagatttctttcaacagatgatcgactcccagaattccaaagaaacaaagtcccataaagctctgtctgatctggagcttgtggcccagtcaattatcatcatttttgctgcctatgacacaactagcaccactctccccttcattatgtatgaactggccactcaccctgatgtccagcagaaactgcaggaggagattgacgcagttttacccaataaggcacctgtcacctacgatgccctggtacagatggagtaccttgacatggtggtgaatgaaacgctcagattattcccagttgttagtagagttacgagagtctgcaagaaagatattgaaatcaatggagtgttcattcccaaagggttagcagtgatggttccaatctatgctcttcaccatgacccaaagtactggacagagcctgagaagttctgccctgaaagatcccactgaaattagacaatctaccaattcttcaaccagaaaaacctattgttttaaaagtgcacttaagagatgggattacaagtggaccctga

SEQ ID NO: 78 - DNA, 523 bp, Homo sapiens
cggaagttttgctgctagtcgcggacgcaatggcttcaaggttacttcgcggagctggaacgctggccgcgcaggccctgagggctcgcggccccagtggcgcggccgcgatgcgctccatggcatctggaggtggtgttcccactgatgaagagcaggcgactgggttggagagggagatcatgctggctgcaaagaagggactggacccatacaatgtactggccccaaagggagcttcaggcaccagggaagaccctaatttagtcccctccatctccaacaagagaatagtaggctgcatctgtgaagaggacaataccagcgtcgtctggttttggctgcacaaaggcgaggcccagcgatgcccccgctgtggagcccattacaagctggtgccccagcagctggcacactgagcacctgcactaaattactcaaaatgtgctgtaaagtttcttctttccagtaaagactagccattgcattggctccttctcccataaaaaaaaaaaaaaaaaaa

SEQ ID NO: 79 - DNA, 1264 bp, Homo sapiens
cgcgagccgggaccacgccgacccagcgtgcccaggccgaggaaagcgcggcggcggcagtccgaagacccaccggactgaaagagaaggacgaggtcatcttcggacgggaggggcaagccagccatcctgggaccccaggcgtgcaggttctctttgagggtattccaccctgcaaaaagcatgtattcatggtcagctctcagcaaggccagtagcagagtggtaaaggccttggccctccaaggctgggaaaagacaatgacaagtcaaatccagacctatgttggatgttggtctactaggtgactgtctcctggaaatgttatgcagctcagcaaggtgaagtttcgaaatcagtatgacaatgatgtcactgtttggaccgcccagggcaggattcatcaaattgaatatgcaatggaagctgttaaacaaggttcagccacagttggtctgaaatcaaaaactcatgcagttttggttgcattgaaaagggcgcaatcagagcttgcagctcatcagaaaaaaattctccatgttgacaaccatattggtatctcaattgcggggcttactgctgatgctagactgttatgtaattttatgcgtcaggagtgtttggattccagatttgtattcgatagaccactgcctgtgtctcgtcttgtatctctaattggaagcaagacccagataccaacacaacgatatggccggagaccatatggtgttggtctccttattgctggttatgatgatatgggccctcacattttccaaacctgtccatctgctaactattttgactgcagagccatgtccattggagcccgttcccaatcagctcgtacttacttggagagacatatgtctgaatttatggagtgtaatttaaatgaactagttaaacatggtctgcgtgccttaagagagacgcttcctgcagaacaggacctgactacaaagaatgtttccattggaattgttggtaaagacttggagtttacaatctatgatgatgatgatgtgtctccattcctggaaggtcttgaagaaagaccacagagaaaggcacagcctgctcaacctgctgatgaacctgcagaaaaggctgatgaaccaatggaacattaagtgataagccagtctatatatgtattatcaaatatgtaagaatacaggcaccacatactgatgacaataatctatactttaaccaaaagttgcagagtggtggaatgctattttttaggaatcagtc

SEQ ID NO: 80 - DNA, 1308 bp, Homo sapiens
gtcagccgctgtccccttagccgcgatgccgctggagaacctggaggaggagggtctgcccaagaaccccgacttgcgtatcgcgcagctgcgcttcctgctcagcctgcccgagcaccgcggagacgctgccgtgcgcgacgagctgatggcggccgtccgcgataacaacatggctccttactatgaagccttgtgcaaatccctcgactggcagatagacgtggacctactcaataaaatgaagaaggcaaatgaagatgagttgaagcgtttggatgaggagctggaagatgcagagaagaatctaggagagagcgaaattcgcgatgcaatgatggcaaaggccgagtacctctgccggataggtgacaaagagggagctctgacagcctttcgcaagacatatgacaaaactgtggccctgggtcaccgattggatattgtattctatctccttaggattggcttattttatatggataatgatctcatcacacgaaacacagaaaaggccaaaagcttaatagaagaaggaggagactgggacaggagaaaccgcctaaaagtgtatcagggtctttattgtgtggctattcgtgatttcaaacaggcagctgaactcttccttgacactgtttcaacatttacatcctatgaactcatggattataaaacatttgtgacttatactgtctatgtcagtatgattgccttagaaagaccagatctcagggaaaaggtcattaaaggagcagagattcttgaagtgttgcacagtcttccagcagttcggcagtatctgttttcactctatgaatgccgttactctgttttcttccaatcattagcggttgtggaacaggaaatgaaaaaggactggctttttgcccctcattatcgatactatgtaagagaaatgagaattcatgcatacagtcagctgctggaatcatataggtcattaacccttggctatatggcagaagcgtttggtgttggtgtggaattcattgatcaggaactgtccaggtttattgctgccgggagactacactgcaaaatagataaagtgaatgaaatagtagaaaccaacagacctgatagcaagaactggcagtaccaagaaactatcaagaaaggagatctgctactaaacagagttcaaaaactttccagagtaattaatatgtaaagccatgtaactaacaaaggatttgctttagagataattatttggaatttttatagcttacttcacaatgtgcccaggtcagctgtataaaataaatactgcattgttgtttc

SEQ ID NO: 81 - DNA, 2165 bp, Homo sapiens
atggctgtgcgcggcgccaacaccttgacgtccttctccatccaggcgatcctcaacaagaaagaggagcgcggcgggctggccgcgccagaggggcgcccggcgcccgggggcacagcggcatcggtggccgcggctcccgctgtctgctgttggcggctctttggggagagggacgcgggcgcgttggggggcgccgaggactctctgctggcgtctcctgccggtaccagaacagctgcggggcggactgcggagagcccggaaggctgggactcggactccgcgctcagcgaggagaacgagagcaggcggcgctgcgcggacgcgcggggggccagcggggccggccttgcggggggatccttgagcctcggccagccggtctgtgagctggccgcttccaaagacctagaggaggaagccgcgggccggagcgacagcgagatgtccgccagcgtctcaggcgaccgcagcccaaggaccgaggacgacggtgttggccccagaggtgcacacgtgtccgcgctgtgcagcggggccggcggcgggggcggcagcgggccggcaggcgtcgcggaggaggaggaggagccggcggcgcccaagccacgcaagaagcgctcgcgggccgctttctcccacgcgcaggtcttcgagctggagcgccgctttaaccaccagcgctacctgtccgggcccgagcgcgcagacctggccgcgtcgctgaagctcaccgagacgcaggtgaaaatctggttccagaaccgtcgctacaagacaaagcgccggcagatggcagccgacctgctggcctcggcgcccgccgccaagaaggtggccgtaaaggtgctggtgcgcgacgaccagagacaatacctgcccggcgaagtgctgcggccaccctcgcttctgccactgcagccctcctactattacccgtactactgcctcccaggctgggcgctctccacctgcgcagctgccgcaggcacccagtgaacccgcttgggctgaggcagcgagtgattcccgcgctccggctccggaccggcgctgacagctgtaggctgtagcctgcacggggcgccccgccaaggaggcacctggaggtgaaacccagctccagctcccgttagccaggacttgtcccctggcagctgggctgagtctgccctgagggggcgcctttttctaatttgaacagaggcaccctatggcctaggggccctgatcgcccacctgcctggaagcccctgggctctatttattatcatgacaatgttggaattaaattttgattcgaatatgtctgcctgggggtggggttttccctgagcggcaactcctggagaccacatagcctgaatcctcagaatttcaggcctgctgggagctttctgcactaggccacactagttcatggtatccatgctaccaatctatgtgtatctacatatcttttatttttggaaattgcatttgtaaccaaggggtgcgaaaccctggcagtcccaggcagcaccaggccaggggttgatttgaaacgtgaaggattgggttttcaggccctctgctccacccctcctgtgtgtcagagctagggtgggggtgcccgattcgggtgctgaatgtaaggaggggagcctccaagtgtggtgcaagccgggggtctccacatcttccttctctgaagtccaggtacctgcacaagcaggaagcgcctgggagtcccggaaggaggagagcgcacacccaggcagccctctgcggaaactttccttggtttctttttatttgtgtaaaggaggttaagacgtgtcgcacttttcagttgtttgtattcaaatgacgattatttttctactcaatgtgaatatccctggccagcctttccacggcgcccaccgcagtgccgctgcctggccctcagtgtctaccttctgccctctgcgactccagtgctctggcccgggactcccctatccgcccctcacttacccttaaacaggtgatcccacctgtcttgtcaacctcgccgcttttcgcctccttaatggcactgtgcactcaactagagtattaactgtaaaaagatttgtgaagtttggaagctctattcgctgtattttttctttaatttataaacttttagtttaacatgc

SEQ ID NO: 82 - DNA, 2697 bp, Homo sapiens
acgcgggcacgcacacacggaagcacgcctccacttaactcgcgccgccgcggcagctcgagtccaccagcagcgccgtccgcttgaccgagatgctgcgggcctgtcagttatcgggtgtgaccgccgccgcccagagttgtctctgtgggaagtttgtcctccgtccattgcgaccatgccgcagatactctacttcaggcagctctgggttgactactggcaaaattgctggagctggccttttgtttgttggtggaggtattggtggcactatcctatatgccaaatgggattcccatttccgggaaagtgtagagaaaaccataccttactcagacaaactcttcgagatggttcttggtcctgcagcttataatgttccattgccaaagaaatcgattcagtcgggtccactaaaaatctctagtgtatcagaagtaatgaaagaatctaaacagtctgcctcacaactccaaaaacaaaagggagatactccagcttcagcaacagcacctacagaagcggctcaaattatttctgcagcaggtgataccctgtcggtcccagcccctgcagttcagcctgaggaatctttaaaaactgatcaccctgaaattggtgaaggaaaacccacacctgcactttcagaagaagcatcctcatcttctataagggagcgaccacctgaagaagttgcagctcgccttgcacaacaggaaaaacaagaacaagttaaaattgagtctctagccaagagcttagaagatgctctgaggcaaactgcaagtgtcactctgcaggctattgcagctcagaatgctgcggtccaggctgtcaatgcacactccaacatattgaaagccgccatggacaattctgagattgcaggcgagaagaaatctgctcagtggcgcacagtggagggtgcattgaaggaacgcagaaaggcagtagatgaagctgccgatgcccttctcaaagccaaagaagagttagagaagatgaaaagtgtgattgaaaatgcaaagaaaaaagaggttgctggggccaagcctcatataactgctgcagagggtaaacttcacaacatgatagttgatctggataatgtggtcaaaaaggtccaagcagctcagtctgaggctaaggttgtatctcagtatcatgagctggtggtccaagctcgggatgactttaaacgagagctggacagtattactccagaagtccttcctggatggaaaggaatgagtgtttcagacttagctgacaagctctctactgatgatctgaactccctcattgctcatgcacatcgtcgtattgatcagctgaacagagagctggcagaacagaaggccaccgaaaagcagcacatcacgttagccttggagaaacaaaagctggaagaaaagcgggcatttgactctgcagtagcaaaagcattagaacatcacagaagtgaaatacaggctgaacaggacagaaagatagaagaagtcagagatgccatggaaaatgaaatgagaacccagcttcgccgacaggcagctgcccacactgatcacttgcgagatgtccttagggtacaagaacaggaattgaagtctgaatttgagcagaacctgtctgagaaactctctgaacaagaattacaatttcgtcgtctcagtcaagagcaagttgacaactttactctggatataaatactgcctatgccagactcagaggaatcgaacaggctgttcagagccatgcagttgctgaagaggaagccagaaaagcccaccaactctggctttcagtggaggcattaaagtacagcatgaagacctcatctgcagaaacacctactatcccgctgggtagtgcagttgaggccatcaaagccaactgttctgataatgaattcacccaagctttaaccgcagctatccctccagagtccctgacccgtggggtgtacagtgaagagacccttagagcccgtttctatgctgttcaaaaactggcccgaagggtagcaatgattgatgaaaccagaaatagcttgtaccagtacttcctctcctacctacagtccctgctcctattcccacctcagcaactgaagccgcccccagagctctgccctgaggatataaacacatttaaattactgtcatatgcttcctattgcattgagcatggtgatctggagctagcagcaaagtttgtcaatcagctgaagggggaatccagacgagtggcacaggactggctgaaggaagcccgaatgaccctagaaacgaaacagatagtggaaatcctgacagcatatgccagcgccgtaggaataggaaccactcaggtgcagccagagtgaggtttaggaagattttcataaagtcatatttcatgtcaaaggaaatcagcagtgatagatgaagggttcgcagcgagagtcccggacttgtctagaaatgagcaggtttacaagtactgttctaaatgttaacacctgttgcatttatattctttccatttgctatcatgtcagtgaacgccaggagtgctttctttgcaacttgtgtaacattttctgttttttcaggttttactgatgaggcttgtgaggccaatcaaaataatgtttgtgatctctactactgttgattttgccctcggagcaaactgaataaagcaacaagatg

SEQ ID NO: 83 - DNA, 792 bp, Homo sapiens
gttttactggaaaggaaagatgatgctcagttttaaacgttaaaagtgtacaagttgctttgttacaataaaactaaatgtgtacacaaaggatttgatgcttttctctcagcataggtatgcttactatgaccttccaagtttgacttgtataacatcactgtcaaactttgtcaccctaacttcgtattttttgatacgcactttgcaggatgacctcagggctatgtggattgagtaatgggatttgaatcaatgtattaatatctccatagctgggaaacgtgggttcaatttgccattggtttctgaaagtattcacatcatttgggataccagatagctcaatactctctgagtacattgtgcccttgatttttatctccaagtggcagtttttaaaattggccttttacctggatataaattaattgtgcctgccaccaccatccaacagacctggtgctctaatgccaagttatacacgggacagttgctggcatgtctttattggctatataaaatgtggccaagaagatatgctctcagtaagaagtctgatggtgagcagtaactgtccctgctttctagtataaagctctcagatgtgaccatgtgaatcatggtgggataatggactcagctctgtatgcttcatgccattgtgcagagtagcacccttatgcataagctttttaatgctgtacaatatagtcgctgaaagtaaatgccacctttttagcagtgaattaatggacagtctggtgaaacttcaatgctttttgatgtata

SEQ ID NO: 84 - DNA, 2491 bp, Homo sapiens
actgtccgccgccgtgtccgcggctgcgccagacagtgtagaacctgcggcctcgatgtccttctcccgtgccctattgtgggctcggctcccggcggggcgccaggctggccaccgggcagccatctgctctgcccttcgtccccactttgggccctttcccggggttctggggcaagtttctgtccttgccaccgcctcctcctctgcctccggtggctccaaaataccaaacacgtccttgttcgtgcccctgactgtgaaacctcagggccccagcgccgacggcgacgtcggggccgagctaacccggcctctggacaagaatgaagtaaagaaggtcttagacaaattttacaagaggaaagaaattcagaaactgggtgctgattatggacttgatgctcgtctcttccaccaagctttcataagctttagaaattatattatgcagtctcattccctggatgtggacattcacattgttttgaatgatatttgcttcggtgcagctcatgcggatgatttattcccatttttcttgagacatgccaaacaaatatttcctgtgttggactgtaaggatgatctacgtaaaatcagtgacttaagaataccacctaactggtacccagatgctagagccatgcagcggaagataatatttcattcaggccccacaaacagtggaaagacttatcacgcaatccagaaatacttctcagcaaagtctggagtgtattgtggccctctaaaattactggcacatgagatcttcgaaaagagtaatgctgctggtgtgccatgtgacttggtgacaggtgaagagcgtgtgacagttcagccaaatgggaaacaggcttcacatgtttcttgtacagttgagatgtgcagtgttacaactccttatgaagtggctgtaattgatgaaattcaaatgattagagatccagccagaggatgggcctggaccagagcacttctaggactgtgtgctgaagaggttcatttgtgtggagaacctgctgctattgacctggtgatggagcttatgtacacaacgggggaggaagtggaggttcgagactataagaggcttacccccatttctgtgctggaccatgcactagaatctttagataaccttcggcctggggactgcattgtctgttttagcaagaatgatatttattctgtgagtcggcagattgaaattcggggattagaatcagctgttatatatggcagtctcccacctgggaccaaacttgctcaagcaaaaaagtttaatgatcccaatgacccatgcaaaatcttggttgctacagatgcaattggcatgggacttaatttgagcataaggagaattattttttactcccttataaagcccagtatcaatgaaaagggagagagagaactagaaccaatcacaacctctcaagccctgcagattgctggcagagctggcagattcagctcacggtttaaagaaggagaggttacaacaatgaatcatgaagatctcagtttattaaaggaaattttgaagaggcctgtggatcctataagggcagctggtcttcatccaactgctgagcagattgaaatgtttgcctaccatctccctgatgcaacactgtccaatctcattgatatttttgtagacttttcacaagttgatgggcagtattttgtctgcaatatggatgattttaaattttctgcagagttgatccagcatattccactaagtctgcgagtgaggtatgttttctgcacagctcctatcaacaagaagcagccttttgtgtgttcttcactgttacagtttgccaggcagtatagcaggaatgagcccctgacctttgcatggttacgccgatacatcaaatggcctttacttccacctaagaatattaaagacctcatggatcttgaagctgtccacgatgtcttggatctttacttgtggctaagctaccgatttatggatatgtttccagatgccagccttattcgagatctccagaaagaactagatggtattatccaagatggtgtgcacaatatcactaaattgattaaaatgtctgagacgcataagctgttgaatttggagggctttccatcagggagccagtcacgattgtcaggaaccttaaagagccaagctagaaggacacgcggcaccaaagctctagggagtaaagctactgagccacccagccccgatgcaggagagctgtcccttgcttccagattggtgcagcaaggactcctcactccagacatgctgaaacagctagaaaaagagtggatgacacaacaaactgaacacaacaaagaaaaaacagagtctgggactcatccaaaagggacgagaagaaagaagaaggaacctgattcggactagttttctgttcctgtttttttttttttatttaattttgcaaataaaaatttattttgaagaaaaaaaaaaaaaaaa

SEQ ID NO: 85 - DNA, 1488 bp, Homo sapiens
gccacgtcactggctcaggctcagctgctgggtcaccaggagaatggacccttcctccacctcagctcagagcacagtgatgattcgtgactttcccaatagaacttcaaatctctgaggacggggggtggggggatgtgcttgagtgtttgtactcatggtcttgttctcggagtgacaaagctggaacacaatacctctatgcatgaaaaggttgtcacttgtcacaactaacaggctttcacctcaaggaaattttcttcccttgtgtacttttcccctggcagtggacatggctgcactcttccaagaagcaagcagctgtcccgtctgctcagactatctggaaaaaccaatgtccctggagtgtggatgcaccgtctgcctcaagtgcatcaattcgctgcagaaggagccccatggggaggatctgctttgctgttgctgttccatggtctctcagaggaacaaaatcaggcccaatcggcagctagagaggctggtttcccacatcaaggaactggagcccaagctgaagaagattctacagatgaacccaaggatgcggaagttccaagtggatatgaccttggatgccgacacagccaacaacttcctcctcatttctgacgacctcaggagcgtccgaagtgggctcatcacacagaatcggcaagaccttgccgagagatttgacgtgtccgtttgcatcctgggctcccctcgctttacctgtggccgccactactgggaggtggacgtgggaacaagcacagaatgggacctgggagtctgcagagaatctgttcactgcaaagggaagatccagctgaccacagagcttggattctggactgtgagtttgagggatggaagccgcctctctgccagcacggtgccgctgactttcctcttagtagaccgcaagttacagcgagtggggatttttctggatatgggcatgcagaacgtttccttttttgatgctgaaagtggttcccatgtctatacattcaggagcgtctctgctgaggagccactgcgcccatttttggctccttcaattccacctaatggtgatcaaggtgtcttgagcatctgtcctttgatgaactcaggcactactgatgctccagtccgtcctggggaggccaaataagccgccactgcaaaaaaaaacagggtcagaaaattacttgggtgggtagacttaggaattttctacttggtaaaagcattatacagtcataggagaaagatatgggacatttctataatctatattctaatttgattcgattattgagtcgtaagtattaattattgccaccatccaactcattgagtcttatggttcacatcttgtttcctatagaaatgttctgtattctcggatcaatttccaaatgctttactttttcatttctgtaagttcaaatcaatgtttaaattatagaagttatgaggtaaataaacatttggatatca

SEQ ID NO: 86 - DNA, 2012 bp, Homo sapiens
cggggctgctcagtcctccaggcgtcggtactcagcggtgttggaacttcgttgcttgcttgcctgtgcgcgcgtgcgcggacatggcctcaaacgattatacccaacaagcaacccaaagctatggggcctaccccacccagcccgggcagggctattcccagcagagcagtcagccctacggacagcagagttacagtggttatagccagtccacggacacttcaggctatggccagagcagctattcttcttatggccagagccagaacacaggctatggaactcagtcaactccccagggatatggctcgactggcggctatggcagtagccagagctcccaatcgtcttacgggcagcagtcctcctaccctggctatggccagcagccagctcccagcagcacctcgggaagttacggtagcagttctcagagcagcagctatgggcagccccagagtgggagctacagccagcagcctagctatggtggacagcagcaaagctatggacagcagcaaagctataatccccctcagggctatggacagcagaaccagtacaacagcagcagtggtggtggaggtggaggtggaggtggaggtaactatggccaagatcaatcctccatgagtagtggtggtggcagtggtggcggttatggcaatcaagaccagagtggtggaggtggcagcggtggctatggacagcaggaccgtggaggccgcggcaggggtggcagtggtggcggcggcggcggcggcggtggtggttacaaccgcagcagtggtggctatgaacccagaggtcgtggaggtggccgtggaggcagaggtggcatgggcggaagtgaccgtggtggcttcaataaatttggtggccctcgggaccaaggatcacgtcatgactccgaacaggataattcagacaacaacaccatctttgtgcaaggcctgggtgagaatgttacaattgagtctgtggctgattacttcaagcagattggtattattaagacaaacaagaaaacgggacagcccatgattaatttgtacacagacagggaaactggcaagctgaagggagaggcaacggtctcttttgatgacccaccttcagctaaagcagctattgactggtttgatggtaaagaattctccggaaatcctatcaaggtctcatttgctactcgccgggcagactttaatcggggtggtggcaatggtcgtggaggccgagggcgaggaggacccatgggccgtggaggctatggaggtggtggcagtggtggtggtggccgaggaggatttcccagtggaggtggtggcggtggaggacagcagcgagctggtgactggaagtgtcctaatcccacctgtgagaatatgaacttctcttggaggaatgaatgcaaccagtgtaaggcccctaaaccagatggcccaggagggggaccaggtggctctcacatggggggtaactacggggatgatcgtcgtggtggcagaggaggctatgatcgaggcggctaccggggccgcggcggggaccgtggaggcttccgagggggccggggtggtggggacagaggtggctttggccctggcaagatggattccaggggtgagcacagacaggatcgcagggagaggccgtattaattagcctggctccccaggttctggaacagctttttgtcctgtacccagtgttaccctcgttattttgtaaccttccaattcctgatcacccaagggtttttttgtgtcggactatgtaattgtaactatacctctggttcccattaaaagtgaccattttagttaaattttgttcctcttcccccttttcactttcctggaagatcgatgtcccgatcaggaaggtagagagttttcctgttcagattaccctgcccagcaggaactggaatacagtgttcggggagaaggccaaatgatatccttgagagcagagattaaacttttctgtcatggggaaaaaaaaaa

SEQ ID NO: 87 - DNA, 9085 bp, Homo sapiens
agtagcgtctgggtccctggactaaagccgtcaaatgtaaccaattgctgaggagctctcccctaagaatcccgcctccactctgaggaacagcttcgctgatcaatggatcccctcctagacgcaatgagcgcgcggggcaagtggagaagcggctgaactgcccaatgaacaagcggtttccgtggttaggggcgtggcagaagcggtcgtcaggggcgtggcggcagttacttgggcggggccggtagcggcgggagctgcactggccaggggttccggctgtatatccatgagcgccgctggcagccggggagctgcaggaaccagactgggggcgagctgagcacctgtagtcaatcacacgcagaaataataatgatacttatgttagaagattgttttgagaagtgcatggagttactacatctgaagcatttagaacagtacctggcacagggttctgtcctcttcatttgcaagccactgctttatccacgagggtgctccctacttatgccagtgaattaatttttggcacagatgaatccttcatatttatctggatttagctggtagcatttgtctcctaagacttggtcacagaggaatccatgtgaccttcaggccttctgctctaaactggcaggagatcctgtttctactcacagcgtccgagggtctggtggccgagccctgaggggcgctgttgctcccaggtggcagaattcagcatcagagagccacacagctgaaagagatggatggcttttaggtttgtttgaataagagatctgacctgaccggcccaactgtacaactcttcaaggaaaattcgtatttgcagtgggaagaataagtaacattgatcaagatgaatgccatgctggagactcccgaactcccagccgtgtttgatggagtgaagctggctgcagtggctgctgtgctgtacgtgatcgtccggtgtttgaacctgaagagccccacagccccacctgacctctacttccaggactcggggctctcacgctttctgctcaagtcctgtcctcttctgaccaaagaatacattccaccgttgatctgggggaaaagtggacacatccagacagccttgtatgggaagatgggaagggtgaggtcgccacatccttatgggcaccggaagttcatcactatgtctgatggagccacttctacattcgacctcttcgagcccttggctgagcactgtgttggagatgatatcaccatggtcatctgccctggaattgccaatcacagcgagaagcaatacatccgcactttcgttgactacgcccagaaaaatggctatcggtgcgccgtgctgaaccacctgggtgccctgcccaacattgaattgacctcgccacgcatgttcacctatggctgcacgtgggaatttggagccatggtgaactacatcaagaagacatatcccctgacccagctggtcgtcgtgggcttcagcctgggtggtaacattgtgtgcaaatacttgggggagactcaggcaaaccaagagaaggtcctgtgctgcgtcagcgtgtgccaggggtacagtgcactgagggcccaggaaaccttcatgcaatgggatcagtgccggcggttctacaacttcctcatggctgacaacatgaagaagatcatcctctcgcacaggcaagctctttttggagaccatgttaagaaaccccagagcctggaagacacggacttgagccggctctacacagcaacatccctgatgcagattgatgacaatgtgatgaggaagtttcacggctataactccctgaaggaatactatgaggaagaaagttgcatgcggtacctgcacaggatttatgttcctctcatgctggttaatgcagctgacgatccgttggtgcatgaaagtcttctaaccattccaaaatctctttcagagaaacgagagaacgtcatgtttgtgctgcctctgcatgggggccacttgggcttctttgagggctctgtgctgttccccgagcccctgacatggatggataagctggtggtggagtacgccaacgccatttgccaatgggagcgtaacaagttgcagtgctctgacacggagcaggtggaggccgacctggagtgaggcctccggactctggcacgctccagcagccctcctctggaagctgcgtcccctcaccccctgtttcaggtctcccatctccctcagtgacctggatctgacctcacaccatcagcagggggcacccaccatgcacacctgtctcggagtaggcagctcttcctgggagctccaggctatttttgtgcttagttactggttttctccattgcattgttaggcatggtgacaagtgacagagttcttgccctctgtccagtttcagcatctggttgcttttaagccaagtacatctagtttccctattaaaaatgtgtctgaatagcgattttgctttgccaccaaaaggcttttccctgagaacagtgaaggatgtatgtcattttgtggtggttgtatgtgtccttacatagaccttaaaaagagctcacccttccaggccaatgctgaagacacagctccgcttgggagcctgagaacccaggcttcccaggccagagtgtggcttcttaaacggcaaaggaaattcctttgagtcacaagccaagttttcgccctgtctcctgagaccatttccctacgctttgctgctgctgagagttacgtgaggcacttgttaaaaattcagcctcccaggtccctcccctcggagaggctgattcactgggtctgggaaggagcctggggattttaatttttcacaagtgccccagatgattctcatcaccaagcaaattttggaaatgctgttcaacagcgcccttaaattggaaacatctttgcagctcgttttattgaaattcataatcaggggtgtcctctagctcccacggtctccagagcagcaaggccggctatggagctgccgtcgtgtgaccacagtgtgatgtctcagaagggctctgggtgggctgagcatctgggctgtgccctggctctgcttttcaccctggacaaagtcgctgtggacttcaatttcttcacctctaaaatgggggacttggaccaggtagattgctgagctcactaccaggttcaaagttcaatgacaaactcagtttactgaggtttgagagaacatccctccaggggagcctgggagctgctctcccagtctaagcatgtagatatcatcgtttgccttttgtgtgtgtgtgtcccttatttgataaaaagatgttttgagttgttttttttttaagcactcacttgtaattttagtttttaaacccaagtccctctaactttgcctttgataccaaacaattcaaaagttggatctgagtttggagaaagatatttccaacctaagtgggtattattttgaaaccagatttttaatttaatagcctatatttgtagtctgttggataggtgtttccaaagtgtgtcttctcaagtgaaaacgcaactctaggtttcaagtactccttttctccgatcctgtggtacttgaatatccaaaaaccctgcactttgaacaatcagctgttgctatctggaactaaacagaactatgagtaaaattgcctggatactttaaaaagatatttttcctccttcatctcctttgactccaggacagactggaatataagtagtgggtctgcatggatgtttcagggatcaaaggagccacctgggcgcctgagtgccaaccctcagggccacaggtgggtgtggtttgggcacgggtccaagtgactgtgacgggacccgtgggcatgggtccaggtctgtaacctgaagaagttgttttctgacaatcaccaaatcatccgaatgacatcaaaagcagcccttatctcagagactgagatttctgtggtctcaacttcgctttggtataatttctggcactcaccagcctctatcattatgactttccccccagtgtattatttctctaataggtttccttttcacgttcttttagcacagactggcactttaccctctcagtttggaagttagcccctctcctctgttacttttcccttcacccaactacagctgtgatctagaacattcatagtcatatttctgctactactaccttcatttatcaagactttttatgagaataggtaaaccaagcaataacttcctaggactgaatcaccaccccagaagagcgagaggctcctttcatatgcctgaggccacaccccttaacctgttctgacaaaatagtggctggcccatgtaccagctccattcagaaattcaggaagagaaaagacagccctgttgtcacacaaaccggtgtgggggagggtggagcctggtctgcacggcagtcctggtggcccctgtggaggacaggcagggctggcagcatagcctttgttgccacacaaccggaatttgctcccccaggactgtgggagccagtgtcccagctgaaatctttttagtgtgtggctctgaatggcactcacattccattttggctcacatgaaactaactgaagccctttgttcaagcttcaggctcttaggcatggaaatgagaatgtgactgtggctgtcttacaggaaaattcttgtttgtccctgaatgagagcacagaggcattgaattcacagagctgcaaacttgcctgataaatgagggagtggcagtttatagataggtcatcttttttccttcctccaggtgtccttgcctttcttcccaaagtcattcatttctgatgagtatatgaatccccctcttgctagtaaggttctatttgggctaaaacaaggctgaatttttaaagagtatttgaatatattttagaatcaaattgaggctataaattgcatcaatctggacaattccattgcaggaataatatgttaaaaaccaatggggagaagcacccacatctctcctgtagcactccgtgtctcataagcaatttgaagacacttacaagtaactgattccagtcaaattaggattaactgactcaaaaaatggtgtcaagtttctttaatgtttttatgttagaagtgagtttaacagacttgaagaaaactgttatcttttcctgctgtgagtttacacaaatgattccagagcagaatgaaagcagaaagctgttggttacaatattcttttaacctctctgcagcattttacacttactgggaaccttatgattcaccgtaagagtggaaatatacctgagttcgtgtcctaatggtctctaattcacattggatcgtgggcaaatcacctcacctctctgagcctgttccctcctcttagaccatctctaagaccacttcatctatttacacatcatttgcttgaacattgctgaacatctgcgtgaacttggcctctccagcccttgcaggtggaaacagctgtgtcaaggctcaaggctcacgctgaggggacttggagggagggggcttctgcattaagctttcctggtgaagacccttgatcttgtccaaagccctgtgtctttgactggcttctcttcagagtccccgttgtcatcgtaagacccttgctgtttggagggtggtcttgtgactgtggcagctgctggccgctggaatgaggagcctatctccatcctccagtgtgactcaggcagagcattgagaattcccagggcagaaatccttcctgctcaggctttcattctaaaactacagtcttcattaaagctgaactttctgggtagctgagcttatatgcccggcatctgaatgagagctctctttgtaactgtgtgacttgagatctagtttgccagctcctgggaaacaatacatgtgttcttgtttgtgtttgctcagcaagcagatgtctgagatgtaagaagcttttcttttcctgtggcattgattctgacttagagctgaagtaaaagatcactgaaacatcacgtcaagttgaagtcactcataggtctttgtcctttaggcaggacaggagagtcattaagaagcatttcactgtagcattctatcacaatatcatctggaattgttttctttgcccagaaagccttaacttgcctctagagaatccctggtattacaacgatattgcggcattagaattccaactcttctgctgtggaagtttgaagcgaagctgcagcaaaaccagagaatttcctcaagtggcctgtaggctccttgttatcttatgcccccacccctccctcaacaatatgagtgatccagaactggcccaaacacctcagctctggtccctttttgcccttcttggccttactctgttgttcaaagccactttggattgcttggatgcttcgaacagccatgaaaagtagcctgcctgtggcatttagaggccaagcaattgacagaaagggtttcttctacctctgttatctaagcagagggaagtaaacctctcaccgccccccacccctcactgcccccgattaccctagaattgctttcgccaaattgtagttgaagctaaggaaggggaatctggcccctgctgggagagggaactggaatgccacacaaggcaaggcctgcttccttccttcccctctgctgctgctgcctcggaacgctgcagcccaggcttcctcccacagtggcccttggaagcaggccgcagagtagacagctgctccttttggaagagtcagtcccctgtgttttctgaactgtttttcctagcatgtatgtgggtagagctttcatgcatctctagtaataataagctgaaattagttttttttttaattctccaatttaaaacttttaattaaaaagtaaattttaatgtcgaaaatgcaaacttggggagggcagaaagatcacacacaaggctgtcacttcatacttgcaggattgcacagcagccgggcagaggcgctcctcacttcccagatggggcggcgggcagcagagacgcacctcacttcctagacagtgcggcagccaggcacaggcacacctcacttcccagacagttgggcggccaggcaagcgctcctcacttcccagatggggcggctcccgggaagcggggctcctcacttcccagacagggtggccaggcagaggtgctcctcacttcccagaacaattctttatgaatttgataaaggactgaagtgcaactgaaagctgctagtgatgatctggtaatatacaatttgtccagtagccagtttgtttttattgtgttttctaaccataagagatcattaaaggcaaagcctgtatgacgctgtacacacacaaaaaaatggtcaccgcaggccatactaccaatgaaatggtaggtaaacaaatcttctggtcaagagaaaaaaaaaagaaatagcactctgcatgctttgctctacaagacgaatttccctagaaagaatccaatgaaggccgggcatagtggctcactcctgtaatcccagcactttggaggccgaggcgggtagatcacctgaggttaggagttcaagaccagcctggccaacatggtgaaaccccttctctactaaaaatgcaaaaattagctgggtgtggtggcgggcgcctgtaatcccagctactcgggaggctgaggtgggagaattgcttgaacccaggagacggaggttgcagtgagccgagatcacgcctctgcactccagcctgggcaacaagagtgagactccgtctccaaaaaaagaaaaggaatccagtgaaaatggctgcaattacaacaagaagtgaaggaagaagactggtgacatctctgaaggatgcagttgaggttgatccaggtttatccgaatatgctacctttctgagccttaaaccttcatctctcaggtgttgatttgcttctgatagcttcatcatttctccctgaagtcttttacactcttctgttagtttccttgtttcagtatcatgaagtgaagcactgtgtggttgtggcgtgggcccgtcttgcttagatgcattcagtgggacagctttgctgggttccatgtcattcaatttatcattttcattggggatctccatttggaatccattaattcatgaggttttgcctcattccacacagcttccatatctgaagtgtttagtggagcaaaaattgtaccataaacttgtgtttactcttttcattcggatcatagtcaaagggctgtagcattactgaaacagtcacagttgaccctgggtcaataattccactgttgggcctcacacagtaccggtgaggcacggtagtcttcactttgaaacacacttttctatccgatggatttcgcaatttaagatttgtagtgactacatctgtgaaggggcctttgaatttgaggtctatgggcgggtcgaggaccaggatctgctcgtgcttcgccgtggccccggaggcagacgccattggagagacagcgcagagcagggggcggcttgctcgctgggggcgggggacgatggcgagaggggagggggagcgagttcgcatctctccttttcctggttagactctgttcaaccacattcttatgttggcagatctgcttccagattgatttttagagcaccatcactttcacattcctgattctgattttgttttgttttgtttgggttttctgaaacttaaaatgctgccccgaaaatactatatttttgagtttgtgttctgaaagcctccgtgctgctggatctttggggggaaatacaggatccttcagcactgaggtgtttaagatttgcaactagcaatgcaattttttctaaatatggggatatttacctttattaagaaattatactaaacattgatgtccttgatcattttatgttctcatattacttttgattctactatgattgtgtggtggtgaacaaagatcattacaaacaaaaactgtaattttgttatatttgattcaatggaatttacctaaaaaataaagactaaaaatgtgg

SEQ ID NO: 88 - DNA, 548 bp, Homo sapiens
gcctcctccgctgtctccctggagttcttgcaagtcggccaggatgtctcaggctgagtttgagaaagctgcagaggaggttaggcaccttaagaccaagccatcggatgaggagatgctgttcatctatggccactacaaacaagcaactgtgggcgacataaatacagaacggcccgggatgttggacttcacgggcaaggccaagtgggatgcctggaatgagctgaaagggacttccaaggaagatgccatgaaagcttacatcaacaaagtagaagagctaaagaaaaaatacgggatatgagagactggatttggttactgtgccatgtgtttatcctaaactgagacaatgccttgtttttttctaataccgtggatggtgggaattcgggaaaataaccagttaaaccagctactcaaggctgctcaccatacggctctaacagattaggggctaaaacgattactgactttccttgagtagtttttatctgaaatcaattaaaagtgtatttgttactttaaaaaaaaaaaaaaaaaaa

SEQ ID NO: 89 - DNA, 3615 bp, Homo sapiens
gcggcggcctcgaggtgacaactgtctccgtcgcaggctccggcgggggcgcaggaggtcgcccggcgcgtcactgtcgggtcggcgagccacgggggccgccgcagcaccatggcgaccaccgtcagcactcagcgcgggccggtgtacatcggtgagctcccgcaggacttcctccgcatcacgcccacacagcagcagcggcaggtccagctggacgcccaggcggcccagcagctgcagtacggaggcgcagtgggcaccgtgggccgactgaacatcacggtggtacaggcaaagttggccaagaattacggcatgacccgcatggacccctactgccgactgcgcctgggctacgcggtgtacgagacgcccacggcacacaatggcgccaagaatccccgctggaataaggtcatccactgcacggtgcccccaggcgtggactctttctatctcgagatcttcgatgagagagccttctccatggacgaccgcattgcctggacccacatcaccatcccggagtccctgaggcagggcaaggtggaggacaagtggtacagcctgagcgggaggcagggggacgacaaggagggcatgatcaacctcgtcatgtcctacgcgctgcttccagctgccatggtgatgccaccccagcccgtggtcctgatgccaacagtgtaccagcagggcgttggctatgtgcccatcacagggatgcccgctgtctgtagccccggcatggtgcccgtggccctgcccccggccgccgtgaacgcccagccccgctgtagcgaggaggacctgaaagccatccaggacatgttccccaacatggaccaggaggtgatccgctccgtgctggaagcccagcgagggaacaaggatgccgccatcaactccctgctgcagatgggggaggagccatagagcctctgcctcgatgccgttttgcccccgctctttggacacgccgacccggcgctccccaaggaatgctgtcccaacaagattcccgtgaaagagcacccgtgtcgccccctcccgtggacttctgtgccgccccgtccacacctgttcttgggtgcatgtgggttttcggttcctggcggtccaggacggggcgggggctcccctcccatctcgtgctgggaggtctcagcgcgctctcctgtccctgggacgtgcgtctctccttctcatgccgttctggaaaatgctcttgctgtagagagcagctgcttctgccagggtgttggaggtggtggagcgccttccgattccattcatggcattttgtgatgtgatgtaattggaatagagctgttgatttaaggcacacacaatccctcacactgtgggttttttttagaacttcccagacgaaaactcacgcccttgccctaacgcgctttgctgtgagcctggcccctgcccagggcttgggtctggtgagctgagcagcttcctgtggatggtgtggggccggcctctggcctggctcacctggccactgtccagccagccttgtgacagactccggcctgaaggcagaatgaacccacacctggagtgaggaagggggcctggcacggttggccaggctctgcctgattgccagccagcgggcatctgaagccgggtccttcgcccgccggaggctgccgtccgtctctcctgctgcgctcgtgccagctccgtgggtgtcctcccagggagcttctcttctcaacaggccttgcgaggctggggtgagaggtgatagaggcagcactgtgcatgattccgagagggtgtggtggcactgccagccgactgctgacagcttgggagctgctgtgcccaggacgtgggttcagcgtgggcgaggaaagcctggcgagcgtggccctgtaaaagctttctgaggcgggaggcgctcacttacctctgactgcctgggcgctgcgtgtagcatcttggcctacaggacagattttaggtgacacctggttatgacagtcagaaatttgagaagcttctcacaagtgatgcactttaaataatctgcatgccattgagacacctgcatgtctggtgtttgtggttcaagtgtcttgccgccggccttcggatgtaaacccactgataacggacagaaagagaatgcccacaagtgggtcttctgtggaagatgcagaaggaggaagttagtgcttacattttagtctttttctccctcaaaaaaataggttaagtttcagtgccagctagaaaatactgctttctgccatcgattgggggtggtttttgtcaaatatactgttgataaatatttatttttgtaaacttgaagtgtgtggtggccgtgggggagggacatgctggcagcaggcgccttcttcagctgtgggtcctaaaggcctttgatcctttgaagaagaaagacatggtatttgttcagcagacgccgaccactcagacggaggggcccctgggattccctgtctcagatggcctggtcttacgcctgtgtagatttcttctccattgggaatgaaggtgtcaggcgggactggaacgttctagatggtatgttccgtgatattaacaactctaacccaggacagaccacaagccacactcagaggcctcactgtgctgggggcttcggtgtccaggcgcccaggtgtggccaccagcaccggtttctgccttcgcgttgctggggtgcagtgagactgccacacgcgtgcacatgtggctctgtgggtgtctcctagagaggacgtggcccctgctgccagcccttgagcagcccgtgtgggggcccgagggacccacacagtgggggccagcctcgctggagggagagcaaccctttgccgatgaccacgcttgccgccatctcttagttttctttttcacaagcgctttatttttttaatagacaaatcacattttgcaaggcctttaattaaataagattcttctttccttcattttatgctttatttcctgtttgaaggcttactgtagaagtggcttactgtagaagcagcttgctgagcccctccgagcggtccccagaattagctggttcacaacccccaccctcccccgcccccgcctgtgtcaggtgtggatgaggtcgtcacactcagaaggacaggcttgtctgccagctcacaaggggaggctgcagtgggtttgggagctgggtttaggcccctggtgtctgagggcccaggccttgccagcctctgctgctcctgctcctgggtttgaagatgcaggccgatcgccagctccgtggcagcggtcactaaggacagcctgactgtgccatcttggagcctcaggcggggctccggagatagaagacaggtcgccggaggctccccctcctctcctctcccctctgcagatgctccctgggcgctaccctgcagggtgccaggcaggagtggtctcagaacgtgcgcttctgattattttactggggtccattgtccagatttttctttgattgtaaaatatatttttactttttagtcttctaatttaataaatgatccatataaaaatagagaaataaagtcctttaagggaaggtttaaaaaaaaaaaa

SEQ ID NO: 90 - DNA, 2565 bp, Homo sapiens
aacggctgcggcttcgggcggccgggtttctccggtctcccaacgccgaggagagcttgtaacaggcgctggagctggcccgccaccgccgcgtcagggacggcgctggagtcctccgttcccctcagcctctgagctgaggccccacaccagagtagggggcggcgcggcacccgtgccccggcatggcgacaccggacgcggggctccctggggctgagggcgtggagccggcgccctgggcgcagctggaggcccccgcccgcctcctgctgcaggcgctgcaggcggggcctgagggggcgcggcgcggcctgggggtgctccgggcgctgggcagccgcggctgggagcccttcgactggggtcgcttgctcgaggccctgtgccgggaggagccggtcgtgcaggggcctgacggccgtctggagctgaaaccactgttgctgcgattgccccggatatgccagaggaacctgatgtccctgctgatggccgttcggccatcgctgccggaaagtgggctcctctctgtgctgcagattgcccagcaggacctagcccctgacccagatgcctggctccgtgccctgggggaattgctgcgaagggatttgggggtggggacctccatggagggagcttctccactgtctgaaagatgccagagacagctccaaagtctatgtagggggctgggcctggggggcaggaggttgaaatccccccaggctccagaccctgaagaagaggagaacagggactcccagcagcctgggaaacgcagaaaggactcagaggaagaggctgccagtcctgaggggaagagggtccccaaaagattacggtgttgggaagaggaagaagatcatgagaaggagagacccgaacataagtcactggaatccctggcagatggaggaagtgcatctcctattaaggaccagcctgtcatggcagttaagactggcgaggacggttcgaatctggatgatgctaaaggtctggctgagagtttggagttgcccaaagctatccaggaccagcttcccaggctgcagcagctgctgaagaccttggaggaggggttagagggattggaggatgcccccccagttgagctacagcttcttcacgaatgtagtcccagccagatggacttgctgtgtgcccagctgcagctccctcagctctcagacctcggtctcctgcggctctgcacctggctgctggccctttcacctgatctcagcctcagcaatgctactgtgctgaccagaagcctctttcttggacggatcctctccttgacttcctcagcctcccgcctgcttacaactgccctgacctccttctgtgccaaatatacataccctgtctgcagcgccctccttgaccctgtgctccaggccccaggcacaggtcctgctcaaacagagttactgtgttgccttgtgaagatggagtccctggagccagatgcacaggttctaatgctgggacagatcttggagctgccctggaaggaggaaactttcttggtgttgcagtcactcctagagcggcaggtggagatgacccctgagaagttcagtgtcttaatggagaagctctgtaaaaaggggctggcagccaccacctccatggcctatgccaagctcatgctgacagtgatgaccaagtatcaggctaacatcactgagacccagaggctgggcctggctatggccctagaacctaacaccaccttcctgaggaagtccctgaaggccgccttgaaacatttgggcccctgaccatccaccaagggaccaccctcttggtgctccatcaccagcttcctgaagggcatttctttcttcaccaccttgtcttgagccctagcctgaggataaaggctgagcctggccatcccagattgcaactgcctccctgttacaggctgcatagggaatattggcttcccagccagcagggaggctcctgggctaagggagctcagctatattttctttttcatttcttttgtttttgagagaaggtattgctctgtcatccaggctggagtgcagtgatgcgattgatcatggctcactgtaacctctgcctcccaggctcgatcctcccatgtcagcctcccaagtagctgggactacatgcacatgacactatgcccagctaattttttattttgtagataatatgctggtcagggctggtcttgaactcctgagctcaagtgatcttcctgccttggcacccaaagtgttgagatttacaggtgtgagccaccacaccaggccagagctatatttccaaaggctgctggccccaggcacactcctcatcaattctcaggctgcagggacaaactttccgatagggctcagtaggatcaagccgacccagagtgggcatgggatgctccaggaggtctggggtaccagtgggctcagatgaagctcttgtgctcatgtatattatgaccttctgtgtttttgtttctgacttgaataatttatcaatggtgttgaataaaagcaagttcaataatgaaaaaaaaaa

SEQ ID NO: 91 - DNA, 2537 bp, Homo sapiens
ggccgcgccctgcagattgtctcttgttgcgtaagtttttttgaccgtcactcgtgtcagcttcaaagtcagatagatttttctcccagcatgttctacttccgaggctgtggccgttgggtcgcggtttccttcaccaagcagcaatttccgttggcacggttgagcagtgacagcgcggcgccccggactccgcacttcgacgtgatagtcattggtggaggacatgccgggactgaggcagccaccgccgccgctcggtgcggctctcggactctgctcctcactcaccgcgtggacacgatcggtcagatgtcatgtaatccttcctttggtggcatcggaaagggacatttaatgagggaagtagatgccttggatggcctgtgttctcgcatctgtgaccagtctggtgtacattataaagtattaaaccggcgtaagggaccagctgtgtggggtctgagagctcagattgataggaaactctacaaacagaacatgcagaaagaaatcttgaatacaccactgcttactgttcaggagggagctgtagaagatcttattcttacagaaccagagcctgaacacactgggaaatgccgtgtcagtggggttgttttggtggatggaagcacagtatatgcagagagtgtgattctgactactgggacatttctgagaggcatgattgtaattggattggagacgcatccagcaggacgtttaggggatcagccttctataggattggctcagacactggagaagttagggtttgtggtgggaaggttgaagactgggactccaccccgaattgccaaagagtccattaatttcagtattctaaacaagcatataccggacaatccatccataccattcagctttaccaatgagacagtatggattaagccagaagatcagctgccatgttacttgactcacaccaaccctagagtggatgagattgtccttaagaaccttcaccttaatagtcatgttaaagaaacgacaagaggacctcgatactgtccctccattgaatcaaaagttttgcgttttccaaaccgtctacatcaggtttggttggaacctgaaggaatggattctgaccttatctacccacaggggttatctatgacgctaccagctgagttacaagagaaaatgatcacatgcatcagaggcttggagaaagctaaagtgattcagccaggctacggtgttcagtatgattacttagatccccgtcagatcaccccttccttggagactcatttggttcaacgactcttctttgctggacagatcaatggcaccactggttatgaggaagctgcagctcaaggtgtgatagccggaatcaacgccagtcttcgggtcagtcgcaagcctccctttgtggttagccgaacagaaggttacataggagtcttgattgatgacctcactactctgggcaccagtgaaccataccgcatgtttaccagccgagtagagttccgtttgtcactgcgccctgataatgctgacagccggctcacactgcgagggtataaagacgctggctgtgtgtcccaacaacgatatgaaagagcttgttggatgaagtcttctttagaagaaggcatttctgtgttgaaatctattgagtttttgagctctaaatggaaaaaattaatcccagaggcttctataagtactagtagaagtctgcctgtcagagctctcgatgttctgaagtatgaggaagttgacatggattcattagccaaggctgttccagagcccttgaagaagtatactaaatgtagagagctggctgaaagactgaaaatagaagccacttatgaatcagtgttgttccatcaactacaagaaataaagggagttcagcaagatgaagctctccaactgccaaaagacctagattatttgactatcagggatgtgtctttgtcccatgaagttcgagagaaactacattttagtcgtccacagacgatcggggctgctagtcgcatacccggagtaacacctgccgccatcatcaatctgctgagatttgtgaagaccactcaacgaagacagtcggctatgaatgaatcatccaagactgatcaatacttatgtgatgcagacagacttcaagagagagagttatagctttcaattcataaaagatttttaaagagcatataaataatttgatcaatacaacagtatagataaaagaattatttagcacatgttaaaatagctttattaggttactatgggtttgccattaatttctgagtgggacagaaattataattgtgctttttcgtgtatatgaaaaaactagtcgtaaacaatttgtactctttctttaaggagctgtaatacaaataactttgtgcagtgttcatcaaagagagagacagtgaacctaaaactgaacctggaataaaactcaacatgcagatttgcctactcatagggactttgcctattaagtctaccaaattaaaagtcttatcattcaaaaaaaa

SEQ ID NO: 92 - DNA, 3889 bp, Homo sapiens
gagactgagtattctaccttgtaaatactgttatttgtatatactgtaaatgatgacatcggtgggcactaaccgagcccggggaaactgggaacaacctcaaaaccaaaaccagacacagcacaagcagcggccacaggccactgcagaacaaattagacttgcacagatgatttcggaccataatgatgctgactttgaggagaaggtgaaacaattgattgatattacaggcaagaaccaggatgaatgtgtgattgctttgcatgactgcaatggagatgtcaacagagctatcaatgttcttctggaaggaaacccagacacgcattcctgggagatggtcgggaagaagaagggagtctcaggccagaaggatggtggccagacggaatccaatgaggaaggcaaagaaaatcgagaccgggacagagactatagtcggcgacgtggtgggccaccaagacgggggagaggtgccagccgtggacgagagtttcgaggtcaggaaaatggattggatggcaccaagagtggagggccttctggaagaggaacagaaagaggcagaaggggccgtggccgaggcagaggtggctctggtaggcgaggaggaaggttttctgctcaaggaatgggaacctttaacccagctgattatgcagagccagccaatactgatgataactatggcaatagcagcggcaatacgtggaacaacactggccactttgaaccagatgatgggacgagtgcatggaggactgcaacagaggagtgggggactgaagattggaatgaagatctttctgagaccaagatcttcactgcctctaatgtgtcttcagtgcctctgcctgcggagaatgtgacaatcactgctggtcagagaattgaccttgctgttctgctggggaagacaccatctacaatggagaatgattcatctaatctggatccgtctcaggctccttctctggcccagcctctggtgttcagtaattcgaagcagactgccatatcacagcctgcttcagggaacacattttctcatcacagtatggtgagcatgttagggaaaggatttggtgatgtcggtgaagctaaaggcggcagtactacaggctcccagttcttggagcaattcaagactgcccaagccctggctcagttggcagctcagcattctcagtctggaagcaccaccacctcctcttgggacatgggctcgacgacacaatccccatcactggtgcagtatgatttgaagaacccaagtgattcagcagtgcacagcccctttacaaagcgccaggcttttaccccatcttcaaccatgatggaggtgttccttcaggagaagtcacctgcagtggctacctccacagctgcacctccacctccgtcttctcctctgccaagcaaatccacatcggctccacagatgtcgcctggatcttcagacaaccagtcctctagccctcagccggctcaccagaaactgaaacagcagaagaaaaaagcctccttgacttctaagattcctgctctggctgtggagatgcctggctcagcagatatctcagggctaaacctgcagtttggggcattgcagtttgggtcagagcctgtcctttctgattatgagtccacccccaccacgagcgcctcttcaagccaggctccaagtagcctgtataccagcacggccagtgaatcatcctctacaatttcatctaaccagagtcaggagtctggttatcagagcggcccaattcagtcgacaacctatacctcccaaaataatgctcagggccctctttatgaacagagatccacacagactcggcggtaccccagctccatctcttcatcaccccaaaaggacctgactcaggcaaagaatggcttcagttctgtgcaggccacgcagttacagaccacacaatctgttgaaggtgctacaggctctgcagtgaaatctgattcaccttccacttctagcatcccccctctcaatgaaacggtatctgcagcttccttactgacgacaaccaatcagcattcatcctccttgggtggcttgagccacagtgaggagattccaaatactaccaccacacaacacagcagcacgttatctacgcagcagaataccctttcatcatcaacatcttctgggcgcacttcgacatccactcttttgcacacaagtgtggagagtgaggcgaatctccattcttcctccagcactttttccaccacatccagcacagtctctgcacctcccccagtggtcagtgtctcctccagtctcaatagtggcagtagcctgggcctcagcctaggcagcaactccactgtcacagcctcgactcgaagctcagttgctacgacttcaggaaaagctcctcccaacctccctcctggggtcccgccgttgttgcctaatccgtatattatggctccagggctgttacatgcctacccgccacaagtatatggttatgatgacttgcagatgcttcagacaagatttccattggattactacagcatcccatttcccacacccactactccgctgactgggagggatggtagcctggccagcaacccttattctggtgacctcacaaagttcggccgtggggatgcctcctccccagccccggccacaaccttggcccaaccccaacagaaccagacgcagactcaccataccacgcagcagacattcctgaacccggcgctgcctcctggctacagttacaccagcctgccatactatacaggggtcccgggcctccccagcaccttccagtatgggcctgctgtgttccctgtggctcctacctcttccaagcagcatggtgtgaatgtcagtgtgaatgcatcggccacccctttccaacagccgagtggatatgggtctcatggatacaacactggtgtttcagtcacctccagtaacacgggcgtgccagatatctcgggttctgtgtactccaaaacccagcagtcctttgagaaacaaggttttcattccggtactcctgctgcttccttcaacttgccttcagccctaggaagtgggggccccatcaatccggccacagctgctgcctacccacctgccccctttatgcacattctgaccccccatcagcagccgcattctcagatccttcaccatcacctgcagcaggatggccagacgggcagcgggcaacgtagccagaccagctccatcccgcagaagccccagaccaacaagtctgcctacaacagctacagctggggggccaactgaggccctgaccctcttctcccggtcccatcttctgagagggcttctcagcctggaaactatggaaacagcatcaaagagaaaggaatgtggggggtttccgctgccccccacccccagcggcccaccccatgcctcagcttcatgtctgtcccattcctataccatccccaccctgttgtatgtattataggatttgtattttctccttttttttcccccttccattccttctcccctcttgcattcaagattatgaaactttgctatgggccctgcacttcctttgcttcctcctgttcaccctggtggtgtacggatgaggcggggaggtgggacccccaaacatatatcagcccaacagccctaagtctccttctttattattaggaaaacaacaacaacaacaaacaaaaaaatggcgtcatgaatatgaacagcattgtcagatgaattagttgaagtggttttttttttgtttttttttttttttttgtactgtgtcctcaaatttaatggattaatgtgtcttgtatatataaaaagaaaacctctaccttcaaaaaaaaaaaaaaaaaa

SEQ ID NO: 93 - DNA, 1475 bp, Homo sapiens
atcttggcctgcaggaacatggcaagggcgagtgaagcagtgtcacgcattttagaagaatggcataaagccaaggtagaagcaatgaccctggacctcgctctgctccgtagcgtgcagcattttgctgaagcattcaaggccaagaatgtgcctcttcatgtgcttgtgtgcaacgcagcaacttttgctctaccctggagtctcaccaaagatggcctggagaccacctttcaagtgaatcatctggggcacttctaccttgtccagctcctcccagggatgttttgtgccgctcagctcctgcccgtgtcattgtggtctcctcagagtcccatcgatttacagatattaacgactccttgggaaaactggacttcagtcgcctctctccaacaaaaaacgactattgggcgatgctggcttataacaggtccaagctctgcaacatcctcttctccaacgagctgcaccgtcgcctctcccacgcggggtcacgtcgaacgcagtgatcgatcctggaaatatgatgtactccaacattcatcgcagctggtgggtgtacacactgctgtttaccttggcgaggcctttcaccaagtccatgcaacagggagctgccaccaccgtgtactgtgctgctgtcccagaactggagggtctaggagggatgtacttcaacaactgctgccgctgcatgccctcaccagaagctcagagcgaagagacggcccggaccctgtgggcctcagcgagaggctgatccaagaacgcttggcagccagtccggctaagtggagctcagagcggatgggcacacacacccgccctgtgtgtgtcccctcacgcaagtgccaggctgggccccttccaaatgtccctccaacacagatccgcaagagtaaaggaaataagagcattcacaacagagtgaaaaatcttaagtaccaatgggaagcagggaattcctggggtaaagtatcacttttctggggctgggctaggcataggtctctttgctttctggtggtggcctgtttgaaagtaaaaacctggttggcgtgtaggttccgtatctccctggagaagcaccagcaattctcttccttttactgttatagaatagcctgaggtcccctcgtccatccagctaccaccaccaccaccactgcagccaggggctggccttctcctacttagggaagaaaaagcaagtgttcactgctccttgctgcattgatccaggagataattgtttcattcatcctgaccaagactgagccagcttagcaactgctggggagacaaatctcagaaccttgtcccagccagtgaggatgacagtgacacccagagggagtagaatacgcagaactaccaggtggcaaagtacttgtcatagactcctttgctaatgctatacaaaaaattctttagagattataacaaatttttcaaatcattccttagatacc

SEQ ID NO: 94 - DNA, 2294 bp, Homo sapiens
  misc_feature (7)..(8): n is a, c, g, or t
  misc_feature (1541)..(1541): n is a, c, g, or t
  misc_feature (1853)..(1854): n is a, c, g, or t
ttccttnnccttcttaaaccattcacagtttcatcttgacttgtgaaggtgagcacggggtgtgaaaggggtttttgtttgtttgtttgttttaaggcagagtctcactccatcacccaggctaggagtgcagaggtgtgatctcggctcactgcaacctccatctcccaagttcaagagattctcgtgtctcagcctccctagtagctaaccgcttttttgcacaacatgggggatcatgtaactcgccttgatcgttgggaaccggagctaaactccaggcctcatgtgattcacctgtcttggcctcccaaagtgctgggattacagacgtgagccactgtgcctagccaagaggctgtgaaaggctttgatagttcttagaggaaccttgggcttggaacgctggcctcgtctgttggttctcattgtacataagaattatttgggttgcttttcaaaaaatatggactccatttccccaccaagacttatgaatcagaacatctctcaagggttggtcccaggaatctgcattttcacagttatcccaggcatgattatgcagccatgccagttcccatccatggcctgtgactgtggactattgcagagtcgttgacaactgggtcgatgctcagcagccttgtcaccctcttgtcaagccagtccccaaggatatagcccagagcttgcaccgtagtgcattatgcctttagttccccacttcatctccatccttacgtttgtggtggctctgtcctgtcttctaggaggaatctgcatgtgtggagacaactgcaaatgcacaacctgcaactgtaaaacatgtcggaagagtgagtatggtgactgggggcaccatggcggtgggagttagaaaagtccaatccaggccaggtgcagtggctcacgtctgtaatcccagcactttgggaggccgaggcgggtggattacctgaggtcaggagttcaagaccagcctggccaacatggtgaaaccccatctctactaaaaatacaataattagctgggcatggtggtgggcacctgtaatcccagctactcaggaggctgaggcaggagaattgcttgaacccaggaggcagaggttgcagtgagcagagatcacaccattgcactccagccttggtgacaagagtgaaactcagtcaaaaaaagaaaaggaaggaagaagaagaaaggaaggaaggaaggaagggagagagagagagagagaaagaaagagagagagagagagagagagagagaagaagaaagaaagaaagaaagaaagaaagaaagaaagaaagaaagaaagaaagaaagaaagaaagaaagatccctatccccaccctcaatcctccagccatggtggattggggcttgtggggagggggtctagatgcctttacccatctggagagatctgaaatgagaactatgtagagacctatggcaggtatctacccagggataagggcatccacagtgtttggagaaggaagaggactgaggggaagttctgtcctgcccagtngtaacagggatagagcactggcctggagttatgagccctaggttctagtcttcttttgccactgtctcatgaccttggcaaaccccctcccttctgtgggcttctgatggactctagatggtccctggggatcccttccaagttctaacatgcctcaaacctcctatctcaagcatttttgaaatgtggattaaaccttagtcacacaccccttctttttcctaatttcctcttaagtagttgggaggggtcagtggagtgagaggaagtgtggttaacccctcagcggatctgcgcatctcctactctttnncaggctgctgttcctgctgccccccgggctgtgccaaatgtgcccggggctgcatctgcaaaggaggctcagacaagtgcagctgctgcccatgaaagccatccatcgtgcccaccccccccaaggagagaaacctgggaagtgtctgtacagtgcatgaatagagaaggtggaataattgtcacaataggttgtgctttttatatatttgcccaaatgtggtgttggtcacattcatgtaaagtatttggggcaataaagttttcactcttggttgcctggtggctcagagcattgtttttccctaacccagcaggaccaaaaggtgctgcttcttttgcagatcctgtaaccaccacccacatgtacctgtgacaggtggctgccttctgcaaggtcctatgactctgcctgggggctttctcctcctgcacaagctt

SEQ ID NO: 95 - DNA, 1746 bp, Homo sapiens
cacattagcaagaaagtcctgctgaagtcatccctgctgtatcaggagaatcaagctcacaatcagatgccggcctcagagctcaaggcttcagaaatacctttccaccctagcattaaaacccaggatcccaaggcagaggagaagtcaccaaagaagcaaaaggtgactctgacagcggcagaggccctaaagctttttaagaaccagctgtctccatatgaacaaagtgaaatcctgggctacgcggagctgtggttcctgggtcttgaagccaagaagctcgacacggctcctgagaaatttagcaagacgagttttgatgatgagcatggcttctatctgaaggtcctgcatgatcacattgcctaccgctatgaagttctggagacaatcgggaaggggtcctttggacaggtggccaagtgcttggatcacaaaaacaatgagctggtggccctgaaaatcatcaggaacaagaagaggtttcaccagcaggccctgatggagctgaagatcctggaagctctcagaaagaaggacaaagacaacacctacaatgtggtgcatatgaaggactttttctactttcgcaatcacttctgcatcacctttgagctcctgggaatcaacttgtatgagttgatgaagaataacaactttcaaggcttcagtctgtccatagttcggcgcttcactctctctgttttgaagtgcttgcagatgctttcggtagagaaaatcattcactgtgatctcaagcccgaaaatatagtgctataccaaaagggccaagcctctgttaaagtcattgactttggatcaagctgttatgaacaccagaaagtatacacgtacatccaaagccggttctaccgatccccagaagtgatcctgggccacccctacgacgtggccattgacatgtggagcctgggctgcatcacggcggagttgtacacgggctaccccctgttccccggggagaatgaggtggagcagctggcctgcatcatggaggtgctgggtctgccgccagccggcttcattcagacagcctccaggagacagacattctttgattccaaaggttttcctaaaaatataaccaacaacagggggaaaaaaagatacccagattccaaggacctcacgatggtgctgaaaacctatgacaccagcttcctggactttctcagaaggtgtttggtatgggaaccttctcttcgcatgaccccggaccaggccctcaagcatgcttggattcatcagtctcggaacctcaagccacagcccaggccccagaccctgaggaaatccaattcctttttcccctctgagacaaggaaggacaaggttcaaggctgtcatcactcgagcagaaaagatgagatcaccaaagagactacagagaaaacaaaagatagccccacgaagcatgttcagcattcaggtgatcagcaggactgtctccagcacggagctgacactgttcagctgcctcaactggtagacgctcccaagaagtcagaggcagctgtcggggcggaggtgtccatgacctccccaggacagagcaaaaacttctccctcaagaacacaaacgttttaccccctattgtatgacctttgctgagggtatgtcctgctcctttccaccagtgatttgtattaagacagcacttatattgtacaatacttcagactgttttttttaaatacataaaactttatgttaaaaactct

SEQ ID NO: 96 - DNA, 816 bp, Homo sapiens
gatttgtaaaccccggagcgaggttctgcttacccgaggccgctgctgtgcggagacccccgggtgaagccaccgtcatcatgtctgaccaggaggcaaaaccttcaactgaggacttgggggataagaaggaaggtgaatatattaaactcaaagtcattggacaggatagcagtgagattcacttcaaagtgaaaatgacaacacatctcaagaaactcaaagaatcatactgtcaaagacagggtgttccaatgaattcactcaggtttctctttgagggtcagagaattgctgataatcatactccaaaagaactgggaatggaggaagaagatgtgattgaagtttatcaggaacaaacggggggtcattcaacagtttagatattctttttattttttttcttttccctcaatccttttttatttttaaaaatagttcttttgtaatgtggtgttcaaaacggaattgaaaactggcaccccatctctttgaaacatctggtaatttgaattctagtgctcattattcattattgtttgttttcattgtgctgatttttggtgatcaagcctcagtccccttcatattaccctctcctttttaaaaattacgtgtgcacagagaggtcacctttttcaggacattgcattttcaggcttgtggtgataaataagatcgaccaatgcaagtgttcataatgactttccaattggccctgatgttctagcatgtgattacttcactccctggactgtgactttcagtgggagatggaattttttccagaaaaactgaactgtggaaaaatga

SEQ ID NO: 97 - DNA, 1820 bp, Homo sapiens
agtgcgcctgcgcgcttgtggagctggtggcggcgctccgcaggggctcggctgttttccgcgcggcaggcgcggccatggcgcagctgggaaagctgctcaaggagcagaagtacgaccggcagctgaggttgtggggtgatcatgggcaagaggctttagaatctgctcatgtttgcctaataaatgcaacagccacaggaactgaaattcttaaaaacttggtactaccaggtattggttcgtttacaattattgatggaaatcaggtcagcggagaagatgctggaaacaatttcttccttcaaagaagcagtatcggcaagaaccgagctgaagctgccatggaattcttacaagaattaaatagcgatgtctctggaagttttgtggaagagagtccagaaaaccttctagacaatgatccctcatttttctgtaggtttactgttgtagttgcaactcagcttcctgaaagcacttcactacgcttagcagatgtcctctggaattcccagattcctcttttgatctgtaggacatatggactagttggttatatgaggatcattataaaagaacatccagtaatagaatctcatccagataatgcattagaggatctacgactagataagccatttcctgaactgagagaacattttcagtcctatgatttggatcatatggaaaaaaaggaccacagtcatactccatggattgtgatcatagctaaatatttagcacagtggtatagtgaaacaaatggacgaatacctaaaacgtataaagaaaaagaggacttcagagatttgattagacaaggaattctaaaaaatgaaaatggggctccagaagatgaagagaattttgaagaagctattaaaaatgtgaacacagcactaaatacaactcagatcccaagcagtattgaagatatatttaatgatgatcgctgcataaatatcaccaaacagactccatcattttggattttagctcgtgccttaaaggaatttgtggccaaagagggtcaaggaaatttacctgttcgaggcacaattcctgatatgattgcagattcaggcaaatatataaaactgcaaaacgtttaccgtgaaaaagcaaagaaagatgctgccgctgtgggtaatcatgttgccaaattgctgcagtccattggccaggcaccagagtccatttcagagaaagaattaaaattactctgcagcaattctgcatttcttcgagtggtaagatgtcgatccttagctgaagaatatggtttggatacaattaacaaggatgaaattatttctagcatggacaatccagataatgaaatagtgttgtacttaatgttacgggctgttgatagatttcataaacaacagggtagatatccaggagtatctaactatcaagttgaagaagatataggaaagttgaagtcttgtctcactggcttccttcaggaatatggtttatctgtaatggtgaaagatgattatgtccacgaattttgccgatatggagctgctgagccacataccattgctgcattcttggggggagctgctgctcaagaggtcatcaaaataatcaccaaacaatttgtaatttttaataatacttacatttacagtggcatgtcacaaacttcagcaactttccagttgtagagtaagcaagcaccttaagtagtgtgttaatgattgaaactgtaattgccttcgggttgtgctttagtctgtaaaattctaaaggagagctgctaaattgttttcttaataaacatttttctcatttgtaaaaaaaaa

SEQ ID NO: 98 - DNA, 1636 bp, Homo sapiens
cagatatggtgatatccttacttctggaattcaaatcaccagttaggggtaccttctcaaataaataaacataatagcactttacgtgtgaataaactcagagaggccctgacaaaccagggttgggctttgcttgggggtaccaacaggcatctactttccatttctattactgtcttgatgtttcttagaattccatcctggaatgctgaccctcaatgagaaggataaattaaaactttattaggctcatttaaatgtcaattaacaaaggatgttcttttttagatcatttaaatttatttcataagctagttgcccaaaagctgctctgctgggcactcatacaaaattattttttaaaaatatacaaattaaatagcagaagagcaagctccccagaacagaaagaaaacaagcagtgctgatcaccatctgggtctccttttgggaggcagaacccaaggggaaaatagaccacatcccctcctttggacgcaatgccaatgcctagggttttgtcagccctggagagagagagagagggagagcgcaggtgcaaattcctcctgtcaatgtaagaattctgtgcttttgatacctccaagagcctctctctgcagaaagtatggaaaatatcgcactgttaaaataacaaatgcagtcagaacaataagaaatacaaaggttcatacctaaggtgtgaaataagaatttacttgcaaactataaggaaggagcacaacaagacagcagatgctaaaagcaccaaagaagagaccaggtcatttgagctgtaatagtttaaagtttggagtgaaaggcctatggaaagaggtaggactacacttgacctttgtagtgcgtgtttgttgtttcagcctgcccaggatcccaccccttattctgaagacagtacctaggttttctattgggacctaccctactcctacttttaatccaaatggcttagataaggtggaccattcccatccttggatctagagagtggcatgtcatccagccttggccagtcagagtcactgtggcttgtgcagggatgggcacatgagctaatcagagcagatgagagtcatccccagacttttgtcagaactgctgggaaagcctatgcccttccagtgggcattgctaagctggtacaatgcaagcctgatgctgtagtggacatccttccaccatataaagacagcctccctgggaaagcagagccatgaaacggagaaagacttcttactaaatccttagagcactagatccagcattttccatctgctatcgctgcatgacaaaccaccttaaaatgctttggcttggccaggtgcagtggctcacgcctgtaatcccagcactttgtgaggcagaggtgagtggatcacctgaggtcaggagttcgagaccagcctgaccaacatggtgaaaccccatctctactaaaaatacaaaaattagctgggagtggtaatgggcacctgtaatcccagctactcaggaggctaaggcaggagaattgcttgaacccgggaggcggaggttgcagtgagccaagatcacgccactgtactctagcctggatgacagagcgagactccatctcaaaaaaaaaaaaaaaaaa

SEQ ID NO: 99 - DNA, 544 bp, Homo sapiens
tttacaattataaagttttatttttgaagaaaattatcatgtgactggcaaattcaagaaaaaaacattagagctgaaaaaaagttattttaatccatcaacctgttccaagaaaagccgctacacatcatcctggctaaatctgtggtaaccctgttttagagacttcttgaaggctactagggggcaaagaggcatggagattcagtctcatggcttttattatgcattccaaataaatagctgttttctgaatgcagttgcccaaatgcctaaaattttctgactggactgattctcactcctgatagatttctaaataccttatagaagtgtcttcaggaaaagacgccaagcaaccctttgaaattcctcaaagctgcacactcatcacctgggaattattcacaacctctcctgcgattgccctgtgggccacaacctctgcctgctgtccctgtcctcgcgaccagctctccctcagggcccccctaaagttactgccccaaagtccagactactccttgggcctccagttaatcct

SEQ ID NO: 100 - DNA, 2706 bp, Homo sapiens
ctctgtagctgtgaccctgataccgcgtggtgtgctccgaacacatggtgcccagaacgaaggcggcgtccagaagccctaggtcccagaggtccgctcagcggcaggcgcataaggcggggccggcgcgggcctttccttccatcggaaccgttctcccggggctgagtccctgcccggactccgaacgccgaagaccaggggccggaagcgcgcgccgccactgccacgccgtgtcagtcgggagggagggagcgagcaggcgaagccgcggaggacggggtgaagatggcggccttctccgagatgggtgtaatgcctgagattgcacaagctgtggaagagatggattggctcctcccaactgatatccaggctgaatctatcccattgatcttaggaggaggtgatgtacttatggctgcagaaacaggaagtggcaaaactggtgcttttagtattccagttatccagatagtttatgaaactctgaaagaccaacaggaaggcaaaaaaggaaaaacaacaattaaaactggtgcttcagtgctgaacaaatggcagatgaacccatatgacagaggatctgcttttgcaattgggtcagatggtctttgttgtcaaagcagagaagtaaaggaatggcatgggtgtagagctactaaaggattaatgaaagggaaacactactatgaagtatcctgtcatgaccaagggttatgcagggtcgggtggtctaccatgcaggcctctttggacctaggtactgacaagtttggatttggctttggtggaacaggaaagaaatcccataacaaacaatttgataattatggagaggaattcactatgcatgataccattggatgttacctggatatagataagggacatgtcaagttctccaaaaatggaaaagatcttggtctggcatttgaaataccaccacatatgaaaaaccaagccctctttcctgcctgtgttttgaagaatgctgaactgaaatttaacttcggtgaagaggaatttaagtttccaccaaaagatggctttgttgctctttccaaggcaccggatggttacattgtcaaatcacagcactcaggtaatgcacaggtgacacaaacaaagtttctccccaatgctccgaaagctctcattgttgaaccttcccgggagttagctgaacaaactttgaacaacatcaagcagtttaagaaatacattgataatcctaaattaagggagcttctgataattggaggtgttgcagcccgggatcagctctctgttttggaaaatggagtagatatagttgtaggtactccgggaagactagatgacttggtgtcaactggaaagctgaacttatctcaagttagattcctggtcctggatgaagctgatgggcttctttctcaaggttattctgattttataaataggatgcacaatcagattcctcaggttacctctgatggaaaaagacttcaggtgattgtttgctctgccactttgcattctttcgatgtaaagaaactgtccgagaagataatgcattttcctacatgggttgacttaaaaggagaagactctgttccagatactgtacaccatgttgttgtcccagtaaatcccaaaactgacagactctgggaaaggcttggaaagagccacattagaactgatgatgtacatgcaaaagataacacaagacctggtgctaatagtccagagatgtggtctgaagctattaaaatcctgaaaggggagtatgctgtccgggcaatcaaggaacataagatggatcaagcaattatcttctgtagaaccaaaattgactgtgataacttggagcagtactttatacaacaaggaggaggacctgataaaaaaggacaccagttctcatgtgtttgtcttcatggtgacagaaagcctcatgagagaaagcaaaacttggaaagatttaagaaaggagatgtaagattcttgatttgcacagatgtagctgctagaggaattgatatccacggtgttccttatgttataaatgtcactctgcccgatgaaaagcaaaactacgtacatcgaattggcagagtaggaagagctgaaaggatgggtctggcaatttccctggtggcaacagaaaaagaaaaggtttggtaccatgtatgtagcagccgtggaaaagggtgttataacacaagactcaaggaagatggaggctgtaccatatggtacaacgagatgcagttactatctgagatagaagaacacctgaactgtaccatttctcaggttgagccggatataaaggtaccagtggatgaatttgatgggaaagttacctacggtcagaaaagggctgctggtggtggaagctataaaggccatgtggatattttggcacctactgttcaagagttggctgcccttgaaaaggaggcgcagacatctttcctgcatcttggctaccttcctaaccagctgttcagaaccttctgatttttacatttactgaataagatttgagtaatgaaagtctgtagtcttaaaactctaaaacagttgtactgcttccaagcagcagtatttatagtaacgtaagctattaatgctaactcttgcatgtcaagaaacattagtcttaggaattcttcaaaaaatggcatcccaatgaaaataaatttgatgactata

SEQ ID NO: 101 - DNA, 391 bp, Homo sapiens
  misc_feature (340)..(340): n is a, c, g, or t
tttttttttttttttttagggtgttttgcagattttttatagcttttgtttttgtttttttttagaaagtttctctgtcatcaggcaaagaccagggtgggaacaggaaaactagaaaactggtcaagggagaacaagtcccttttcctctcaccagtgaacagcaggtgaggaaacagactctgggaggaacgctgttcaggatggcttgctgcctgcatggcatgaggctgctgtcttgtgggtgctggcagccacaatctccatttttctgaagaccaccatttatggctagatccagtagaggtccagaactttcccaacactgctggagaggaantgtttcacagtcagaggagagagccatggggaatggtaacacctcgtgccg

SEQ ID NO: 102 - DNA, 454 bp, Homo sapiens
  misc_feature (384)..(384): n is a, c, g, or t
  misc_feature (387)..(387): n is a, c, g, or t
  misc_feature (389)..(389): n is a, c, g, or t
  misc_feature (392)..(392): n is a, c, g, or t
  misc_feature (394)..(394): n is a, c, g, or t
gttttgctgattttttatagcttttgtttttgtttttttttagaaagtttctctgtcatcaggcaaagaccagggtgggaacaggaaaactagaaaactggtcaagggagaacaagtcccttttcctctcaccagtgaacagcaggtgaggaaacagactctgggaggaacgctgttcaggatggcttgctgcctgcatggcatgaggctgctgtcttgtgggtgctggcagccacaatctccatttttctgaagaccaccatttatggctagatccagtagaggtccagaactttcccaacactgctggagaggaagtgtttcacagtcagaggagagagccatggggaatggaagcaggggaagaaggggtggggaggggangananatnantggctctatgctaatcttagggttccttctctgcccttttgggtaccagagacagaccct

SEQ ID NO: 103 - DNA, 5161 bp, Homo sapiens
gctggcggcgcccggctccgtcctgcccgcggccggcccccgcgtctgctccctccccgcccgggcccctgtcggccgccgccagtccccgccccgactgtgaatgaaaggcgggcgccgccgagggctggctgggaacgccgcagcgacgccggcctctcgagaggcgcgcgccccgccgagatgtacggtgtgtgtggctgctgtggtgccctacgccccaggtacaaaaggctggttgacaacatcttccctgaggatcccgaggatggtctggtgaagaccaacatggagaagctgaccttctatgccctctcagctccagaaaaacttgatcgtattggcgcctacctctctgagaggctcatccgtgacgtgggtcgccatcgatatgggtacgtgtgcattgctatggaggctttggaccagctgctcatggcctgccactgccagagcatcaacctcttcgtggagagcttcctcaagatggtggccaagctgctggagtcagagaaacccaacctgcagatcctcggcaccaactcgtttgtgaagtttgccaacatcgaggaggacaccccgtcctatcaccggagctatgacttctttgtgtcccgattcagtgaaatgtgccactcgagccatgatgacttagaaatcaagaccaaaattcgaatgtcaggcatcaaaggcctgcaaggggtggtgaggaagacggtgaatgatgaactgcaggccaatatctgggacccacagcacatggataagatcgttccatcactgcttttcaatctacagcatgtagaggaggcagagagccggtctccctcacccctccaagcacctgagaaggagaaagagagccccgcggagctggctgagaggtgtcttcgggagctgctgggccgggctgcctttggcaacatcaaaaacgccatcaagcctgttctcatccatctggataaccattctctttgggaacccaaggtgtttgccatccgttgctttaaaatcatcatgtactcaattcagccgcagcactcacacctggtcatccagcagctcctgggccacctggacgccaacagccgcagcgctgcgacggtgcgcgcgggcatcgtggaagtcttgtcggaagccgcggtcatcgctgccaccggctctgtggggcccacagtactggagatgttcaacacgctgctgaggcagctgcggctcagcatcgactacgcgctgaccgggagctacgacggggcggtcagcctcggcaccaagatcatcaaggagcacgaggagcgcatgttccaggaggccgtcatcaagaccgtgggctcctttgccagcacgctgcccacctaccagcgctccgaggtgatcctcttcatcatgagcaaggtcccgcggccatccctgcaccaggcggtggacacaggcaggacgggggagaataggaaccgtctgacccagattatgctgctaaaatccctcctgcaggtatccacaggtttccagtgcaacaacatgatgtcagccctgcctagcaacttcctggaccgccttctctccaccgccctcatggaggatgcagaaattcgactctttgttctagagattctcatcagtttcattgatcgtcatggcaaccgccacaagttctctaccatcagtaccctcagtgacatctctgtcctgaagctgaaagtggacaagtgctctcgacaggacaccgtcttcatgaagaagcactcccagcagctctacagacacatctacctgagctgcaaggaggaaacaaacgtgcagaaacactacgaggcgctctatggcttgctggccctcatcagcatcgagctggctaacgaggaggtggtggtggacctcatccgtctggtgctggctgttcaggacgtggcccaagtcaatgaggagaacttgcctgtctacaaccgctgtgccctctatgctctgggcgcagcctacctgaacctcatcagtcagctcacaacagtgcctgccttctgccagcacatccatgaggtgatagagaccaggaagaaagaggctccatacatgctccccgaggatgtgtttgtggagaggcccaggctgtctcagaatcttgatggggtggtcattgagctcctcttccgccagagcaagatcagtgaagtcctgggaggcagtggctacaactcggaccggctctgcctgccctacattcctcagctgacagatgaggatcgtttatccaagaggaggagcattggagagaccatctccctgcaggtggaggtagaatcgaggaacagtccggagaaggaggaggtgagtgtccgtgccaccgtcctggggcagccccacctcctgtagattggacgctggactccaggctcccctgcctgcatagtgagcttaaggctgcatggaaagcaagcttctcgagtaattccacacttgtactgactctccccacgtatgcgtcatagatacttcccttcggaaaaattgttagggtcctccctgctcccatgaggatatcataaaactcactcttgaaaggcctggctggggatggtggctcacacctgtgatcccaacattttggaggctgaggcaggaggactgcttgagcccaggagtttgagatgatctggggcaatataaggagaccccatctctacaaaaaataattgaaaaatcagccaggcatggtgacgtgcacctgtggtcccaggtactcaggatgctgaggtgggagaatcacctgagcctgggaggtcaaggctgctgtaagccatgatggcagcacggcacttcagcctaggtgacagagtgagacctcgtctcaaaaaaattaaaaagaaaggcatgctggtcatcattccccactcacagggggaccgatatgctctgggttggaaactagaagacttaactggagagataagggtgagaacagctttcatagtgttgcttccgtatgtatcaataaagaatctttttttaaatttacactatttttaaagcaattttagttacagcaaaattgagaggaaggtacagagatcgccctttgccccctcccctcccctgacacatgcacagcctcccctcctatccatatcccccagcagagtggtgcatttcttacagttcaacctgccttaacacaacagtatcatctgaagtctgtcgtttacactggggttcgccctcagcgttgtacattctgtgggtttggacaaatgcgtaatgacatgcatcccccaccagagtaccatacagagtcatttcctgccctaaaaccccctgtgctccacctcttcatctctcccctaaccactgacagccaagatgttttttttttttttttttaatgctgactgttacagttcacaagaagtatggaggacacacatctgggtgggaccgggacagaaagatttacatggtcctcaggcatggacaggctggcattccccagcctctctgcccattagggctgatatagacatggaggacagctttgacatcaagcctttccccagatgcaatcagaggtaggagaagtctctaggggtcaggatcaagcctccccctaactgtgccctcgaccacttcatttattggggcagatctctaccccagggccctcaaagcttatccagaaccttcccacggaaggaagctctgacttgggctaattggacaagtaaaatgaggttgaacgaggcatcctccatggcccttccagctccaaggactgggaacctccaatgcgttaggcatcggggtgagttggctgctctctccccatagtggcgattctcccttcccaagaggtaagagaccctcgggaattgaggagtgaagtgactcagaagcgcaaggcgaaatgcttacacagctacagagccacctcctcactagtggcctcctgggccaccagtatcagttccttcctcccttcaagagtcagcttagcccagaggtagcttggtggcaaagcaggggtgcaggggccttcatcctgtgcccttctgccatgccacaactctctccactctcagccatcagtgccagtccagagtcccacggtggttcctagggccgtactgcccagccttgccgcaggggtgaataaatgcttgtttggtcaaatctgaatcctggtgcctggcattcccagccatgcatagtctgggctctgccatttcatttttccccacctgctctggcccgtatccactgtcccactctggtggggctgctctcgatctctcccacgctgcgctccgccatctccaggcctttgctagtgcagaatgccacatctgaaccacccttccctccacactggtgcagctgagcgcctgtgaactgtctgttctccagcgcccggcccctgttcagtttcctcataaacttctctctccctgctcttgcccagggagcatcccttctctcttgcccagagagcggcattttctttgactgttgccaccacacagttccctagcaccctgcaggtgaatatccaatgttgctcggtgctgacagtggatgaatggatggacgtacagaggataagtcctcagagcgagttaaagccgagcatagctctctcttgcatgtaattcctatgctagcaaattgtgcagtttctatagactcacctacagtcctgcatgtagttggtgctcacttaatgtttgttaaatgactttatctcatacatatacttctgtcctctcctactcaaacaaaaatgccaaacaaatcaaaaaatgcacgactcagtgaattttcataaagtgtgtatgcccacgcaaccacgcctggatgagagagtggaacactgtcatcatccaggggccctgcctctgtgccccctcccctaagggagctcccagcctgagttgcgttacttctggaactttatatcaatgaaatcattctgttctgtgtctgctgcttttgcttaagattatgtttaaatgatagagcatgaggctgggcgtggtggctcatgcctgtaatctcagcactttgggaggccgaggcaggtggatcacctgaggttaggagttcaagaccagcctgatcaacatggtgaaaccccgtctttactaaaactacaaaaaattagccgggcatggtg

SEQ ID NO: 104 - DNA, 2042 bp, Homo sapiens
tggaacaagcgcttcatcttgattttggaactgaattggaaccaagaaaagaaatagtgctatttgataagccaactagaggaactactgtacaaaaatttaaagaaatggtctatagtctctttaaggcaaaattgggtgaccaaggaaacctctctgaactggttaatctcatcttgacggtggctgatggagacaaagatggccaggtttccttgggagaagcaaagtcggcatgggcacttcttcaactgaatgaatttcttctcatggtgatacttcaagataaagaacatacccccaaattaatgggattctgtggtgacctctatgtgatggaaagtgttgaatatacctctctttatggaataagccttccttgggtcattgaactttttattccatctgggttcagaagaagcatggatcagctgttcacaccatcatggccaagaaaggccaaaatagccataggacttctagaatttgtggaagatgttttccatggcccctacggaaatttcctcatgtgcgatactagtgccaaaaacctaggatataatgataagtatgatttgaaaatggtggatatgagaaaaattgtgccagagacaaacctgaaagaacttattaaggatcgtcactgtgagtctgatttggactgtgtctatggcacagattgtagaactagctgtgatcagagtacaatgaagtgtacttcagaagtgatacaaccaaacttggcaaaagcttgtcagttactcaaagactacctactgcgtggtgctccaagtgaaattcgtgaagaattagaaaagcagctttattcttgtattgctctcaaagtcacagcaaatcaaatggaaatggaacattctttgatactaaataacctaaaaacattattgtggaagaaaatttcctacactaatgactcttagttcatttggacataattaccattttaagaaacctgccacttttaaagaacaattttgagcattaaaaaaaaatggcttcaaattcctgccagttacacaaaactccttccccccaggcctgagaagccatcagtatgtgattactgaagtaatggcaggtgtaggatcaacaggtccccaagatgtcattcctgcccttttagaagccctgttacatctccgaagtacattcattgtgtaactattttgactgactttaaaaaccaatgctgtgaaaagcttcattccataaacatcaacagtgagtgatttgtagatttaccttagccaaaataccaatgctggaagcattgtgtttgcattgaagctgctgttcaacaagaaaatttataaatttactaatgtcttagcatggtaaagtttgcacattaacagaaattaagactgcaaagcaggttaaacttgcttctttataaaacagatgttgggttaatagcatggtttactgtattaaagacttatacacccatttttaacctcatttagacatcaagttatgtgtagcttcacaatggttcaagtggcttacttcaagaaatcttatacttgacagtacaccaattttattgactaaaaatggatgaactttcctaaagattcaaagggcccatcttagtatcacgcagctgactgagcccttcaaaactgacatcttaaggcccaatcaagatccacatatcctgattttgaactatgtgaaagtgggactgttaagtgcaagactaaaataaattatagcagactttttagtaataactttccattttcaaacagtatatcctgtgggccaaagggctatttcttaaagaggcatgtaaatgtatttatttatctaatgtttttttccccatgtaaacttgatatacaaggtttagtatttgctcctctttcatattattttcacacgtatactcagatttggcatgtacctttcaacatctccataaaattaaacaccttttggaaaaaaaaaaaaaaaaaaaaaaaaaaaaaaaaaaaaaaaaaaaaaaaaaaaaaaaaaaaaaaaaaaaaaaaaaaaaa

SEQ ID NO: 105 - DNA, 2794 bp, Homo sapiens
gagagaagaggaggtggagaaggcttgggctcgcgccgctgaagtcggcttacccgctggccgcctcctgacaagcgggagggatccgcggtggacccagggaagcggaggagcctggcggccaccccctcttcctcacttccctgtactctcatcgctctcggcctccgacacgaaaaggaagcaaatgagctgatggaagatctgtttgaaactagacagggtcttgccatgttctggaactcataggctcaagtaatcttcctgcctcaacctcccaaagtgctggaattacagttccaagatgagatgggattctccaacatggaagatgatggcccagaagaggaggagcgtgtggctgagcctcaagctaactttaacacccctcaagctctacggtttgaggaactactggccaacctactaaatgaacaacatcagatagcgaaggaactatttgaacagctgaagatgaagaaaccttcagccaaacagcagaaggaggtagagaaggttaaaccccagtgtaaggaagttcatcagaccctgattctggacccagcacaaaggaagagactccagcagcagatgcagcagcatgttcagctcttgacacaaatccaccttcttgccacctgcaaccccaatctcaatccggaggccagtagcaccaggatatgtcttaaagagctgggaacctttgctcaaagctccatcgcccttcaccatcagtacaaccccaagtttcagaccctgttccaaccctgtaacttgatgggagctatgcagctgattgaagacttcagcacacatgtcagcattgactgcagccctcataaaactgtcaagaagactgccaatgaatttccctgtttgccaaagcaagtggcttggatcctggccacaagcaaggttttcatgtatccagagttacttccagtgtgttccctgaaggcaaagaatccccaggataagatcctcttcaccaaggctgaggacaatttgttagctttaggactgaagcattttgaagggactgagtttcttaaccctctaatcagcaagtaccttctaacctgcaagactgcccgccaactgacagtgagaatcaagaacctcaacatgaacagagctcctgacaacatcattaaattttataagaagaccaaacagctgccagtcctaggaaaatgctgtgaagagatccagccacatcagtggaagccacctatagagagagaagaacaccggctcccattctggttaaaggccagtctgccatccatccaggaagaactgcggcacatggctgatggtgctagagaggtaggaaatatgactggaaccactgagatcaactcagatcaaggcctagaaaaagacaactcagagttggggagtgaaactcggtacccactgctattgcctaagggtgtagtcctgaaactgaagccagttgccgaccgtttccccaagaaggcttggagacagaagcgttcatcagtcctgaaacccctccttatccaacccagcccctctctccagcccagcttcaaccctgggaaaacaccagcccaatcaactcattcagaagcccctccgagcaaaatggtgctccggattcctcacccaatacagccagccactgttttacagacagttccaggtgtccctccactgggggtcagtggaggtgagagttttgagtctcctgcagcactgcctgctatgccccctgaggccaggacaagcttccctctgtctgagtcccagactttgctctcttctgcccctgtgcccaaggtaatgatgccctcccctgcctcttccatgtttcgaaagccatatgtgagacggagaccctcaaaaagaaggggagccagggcctttcgctgtatcaaacctgcccctgttatccaccctgcatctgttatcttcactgttcctgctaccactgtgaagattgtgagccttggcggtggctgtaacatgatccagcctgtcaatgcggctgtggcccagagtccccagactattcccatcgccaccctcttggttaaccctacttccttcccctgtccattgaaccagccccttgtggcctcctctgtctcacccttaattgtttctggcaattctgtgaatcttcctataccatccacccctgaagataaggcccacatgaatgtggacattgcttgtgctgtggctgatggggaaaatgcctttcagggcctagaacccaaattagagccccaggaactatctcctctctctgctactgttttccccaaagtggaacatagcccagggcctccaccagtcgataaacagtgccaagaaggattgtcagagaacagtgcctatcgctggaccgttgtgaaaacagaggagggaaggcaagctctggagccgctccctcagggcatccaggagtctctaaacaactcttcccctggggatttagaggaagttgtcaagatggaacctgaagatgctacagaggaaatcagtggatttctttgagctaggagaataagagtctggagactgggagccttcacttcggcctccgattggtggcgcatagggtgtaaccaataggaaacccctaaagggtacttaaaccccagattttgcaactggggctcttgagcagcttgctttagcctgctcccactctgtggaatatacttttgcttcaataaatctgtgcttttattgctaaaaaaaaaaaaaaaaaaaaaaaaaaaaaaaaaaaaaaaaaaaaaaaaaaaaaaaaaaaaaaaaa

SEQ ID NO: 106 - DNA, 566 bp, Homo sapiens
  misc_feature (538)..(538): n is a, c, g, or t
ttttttttttgagccaagaagtgcagtaggctgcggggattttatttctgcccccagaccaaggcaacggagccctcacctgcctgccacccccacactgggcccaagcaagctcaggtgagcgcacatacatccaccgtggcgggctcctctcgggtgaagccatcaccgaagccctcatcgtccaccaggtcgggctcacggcagcacatgggacagaggctgttgcgcacagcagaggctcggagccagacgacaaggttccaacgctcaccagtgcccaagggccgggctccatgcagctggccgccacggtggaggacaccctggcccaccacgtgctccacctccaggggctccgtcagggctgtgggtgcctggaagaggcccccaaaatacagggcgccccctgtgaagaccttgcccaaggccacattgagggtgagctcggcattatcatagtggcagcccagctccaggtcctggcccggtgcgtatttgaccacaaagggccggtggctgtcgagccggcccccgncacagtcagggtacagcaaggccatcag

SEQ ID NO: 107 - DNA, 2622 bp, Homo sapiens
tcttcgattcttcgagccttttggcctactgaggtggtccaagtactccaagatgttgggtgagagaagctcatgccaggtaaagtcactaactaggtgagacagccaggaagagtttgggattcacaacggcagcacctacgacagagatactgcccttcatcaaaccactggggcaagatgattcattgaaatgttaccctgtgctcatttggtttacatttgctcctcccctggctctttcaagcagagagtgagtcccttggtgtttccttgccttgggtatttctggtggtcagagcataaaagctatcggaagttggtgggtctttctgtcttttgcaataatcttgacctaaatttttttttaaatttcttaattatttttagagacagggtctcactctgccacccaggctggagtgcaatggtgtgatcatagctcactgaagcctccaactcctgagctcaggtgatcctcccgcctaagcctccagagtagctgagactacaagtgctcaccaccatgcccggctaatttttctttttcgtagagacagagatctcgctatgttgcccaggcttgtctcgaactcctggcctcaggtgatcttcccttctcagcctctcaaagtattaggattataggtgtgagccactgcacccagccttcgttgactctttatagagactctgtaaggtgtcctggaaagagaagaaagaaagggtgggcctatgattttttgttttttgagatagagtcttgctccgtcgcccaggctggagtatggtgacatgatcagggctcactgcaacctccatctcctgggctcgggtgatccttccacctcagcctctggagtagctggaactataggtgcatgccaccatgcctggccaatgttttgtatttttagtagagatggggtttcaccatgttgcccaggctggtctcaaactcctagtgctgggattacagatgtgagtcactgcaccaggccaagggtgggcctttgagagcaggaagaagggagaggaaaagatttttaccccagaagggaaaggggcagagtgtgactagggctgggggtagggaggaaaggtctcaaaccttgactctaggcagtgtccaaaggtgacaaggccttagaggacatggctgcctggtacactcagggagagtggatctgagcacagagctttcgcccctccctcacaattcccacattccaagggtgactccaaatcagcagagccaccaagcctgaggtgccacaaggctgggatgatggatgttctgcatttgctagtgtgaccagtggagccagcctgacgcctcagcactgcctaagaccctgggaccttggcaaaatcttgagaatgggggagggagactcaacgatatgcctgagattgaatttcttgccagctcagtgggatagtggcttagagtcagatttaaattgaattagaaaaaatcaagaaacaggccaaaccactccagccttgcaatccctcgggctatccctagccacaccccttactctcatgctcaccaacaagcagtgcctaccaccactggatgccccatgtgacccatagctgaggatctttatacaccctctccccaggagtgggcatccacttgtgtttccctggacagggagcttccaatcttccatcctgaggtcctgctagaatgggctgttagaatattccctcactagatagaggggtggggaagcaggagtccagtttcagaagcagggaagggactacagtcatagcgagtggtggacacgtggcggagggtgggacaccctttcacaaagtggcccatcataccacaacacagtatgggacagggctggcttctcttcagctctggcatggccggggagggtacctacctggggtccagctgcccccccgagcctgtctatcagccattgtacaccaggccagtccatgatggggttcacccaggatgagacctggacagcagttgagccatgcagaagcaagtgggtggttaagaggcagatggtccagttggtgttttcaggcaaagtgccagctcctcatcatggctcatgaggatgcttagatccagcccctgatgaccccctatttcacctctagccatttcctagcacagcgcctcctctgtcctagctccagcctcactgagctgctttcagtcccttgaaggagttgcactctccttcctctcggctcttccacaggctgctccagacgcttgaccactcctttctttcatgtacctaattcctactcatccctcaggacccaatgtggctgtcttctctaggaagccatctgaacttataagttgagttaggagtctgttctggacctcccacagcaccctgattctcctgtcttggcccctgtcataccttgtgaagtcttgtttaatcatctatctcatacatgtcagtatgcttctgggggaaggaaatgtgtccatcttgtttaaaacagtatctttagggcttgatgtctagtgagggaggaagggaaggggaaggaaacgataagggcatgggaaggaaggatggaaggaaggagggaaggaagaagaaaaaaaaaaaaaaaaaa

SEQ ID NO: 108 - DNA, 1453 bp, Homo sapiens
agtcacagccaggtaaccctggagtgaagcggtttagttagaagggagcagataaactcgtcactctagtagctttaaccctcaccctgaggcaccttagcaatcagccattgcctgcaagcctccaaagcttgtctttgcctaatatggagcccaaagaagccactgggaaagaaaacatggtcaccaagaaaaagaatctggccttcttgaggtctagactctatatgctggagagaaggaagactgacactgtggttgagagcagtgtttctggggaccactctggcaccttgaggaggagccaatctgacaggaccgaatacaaccagaaattacaagaaaagatgactccacagggtgagtgttctgtagctgagaccttaaccccagaggaagagcatcatatgaagaggatgatggcaaagcgggaaaagatcattaaggagctgatacagacagaaaaggattatctcaatgatctagagctgtgtgttagggaagtggttcagcccctgagaaataaaaagactgataggctggatgtggatagcttgtttagcaacattgagtccgtgcatcagatatcagccaagctgctgtcattgttggaagaggccacaacagacgtggaaccggccatgcaagtaattggagaagtattcttgcagattaaagggccactggaagatatttataaaatctactgctatcaccatgatgaagcacatagtatactggagtcctatgaaaaggaagaagagctgaaggaacatttgagccactgtatccagtccttaaagtaaggccttttcaaatgatgattcccatctcctctcagttgcctagcagggaacattttaaatggatgtagatgaaaggtctcacataaatcctatgttttatgagacttgctgggagctctgctttgcattccctttataaaaagctgacatgccagaagccctgattgactttttttccccctgcgagaatgactaaaaataacatggaagaagatttagagctctgcagcgattgaaaaatgcaatatcaaaatataaaatgtggaagaaaagcctcttcttaaagctattgtaacttgcctggccccacgtagttcaaggattatgtgagataacacgtggccccatgaccactggagcacatgggttaatggagttaggggaatggcctacaactctgcatggccgtcttctttccccaaactcactgtggggagatgggtgaagacaagtcaggccttgttaaagttagtttcagaacaattactcatgccttcctttctcatccctaaaacattggtgggggagctacacaatgtactttttcttttctagaggaagtatctattcactgtgaaaatctgaaaaatataacaaagtatgtgtaagataaaaaccccttgctatttcaaaaaaaaaaaaaaaaa

SEQ ID NO: 109 - DNA, 1936 bp, Homo sapiens
ctgagagtcagggcggacctggactcggcgcgcctagctcctcggctccctttgcggggactccaggagtctgcccgctcgcgccgtttcgtcctgtcaccccggcaacgggaccctctaagaggcttgttccaaaaatgttcacaatggggtttttaaaaacggttttgttagggacaagtgcttgtgtgagtcctccgacaatgcctgctttcttctctctgcccgcggagcggaggctccaggcctggccccagtccgaggcgcctctgtcggtgtcgtcctgcttccaaaaccggcctccagaacccgcctccttccagaacctccgtccagaacccgcctccctccagaacctccgtacagaacccacatccttctagcacctgcctctggaacccacgtgctttcagaactacctgtttgtagaacttgtttccagaacgaacctgctttccgaatctctttacttccagagcttgtttcctggactgacctattttcagaacctactttcaaaaccagcttgcctccaggaccacctgcttggagaactggcctgcagccccaggactggacgacctgagactgcacagctccctgcggggctcacccggctgtgtgtgtccttccgggccttccatacttccctaggtgtctggtgactccggagcccgctcggatttcgtgtgggtctcgcctcagctcagaacacaccctttgaagagcaggaaggccagggcacaggcggtaaccacggctcctggtcatcaagttcctctgaagcccaggtcttgtccacgttcactgccccaccacaggcccagcggagccttggagctgagccctgggatcattctggtgcctgtgctcccggctccgcaacaagcacacaggagcctgtcatccccagatctaaatcctgaaggctaagctccgtggtctgccgcagccatctgcagcaggcccctcccagcaacagccttctcataaggcccctgccagccacgtgaaacctcctggctagggcctgtcttccactcctggccttttgagacagggcctcactctgttccccaggccggagtgcagtggtacgatcacagctcactgcagcctccacctcctgggctcatgtgatcctcccacctcagcctcctgaatagctgggactacaggcttgcaccaccacacccggctaatttttgtatattttgtagagacagggtttcgccacattgcccaggcccaggctggtctcaaacttctgggctcaagcaattcatctgcctcaacctcccaaaagtgctggattacagggatgagccaccatacccggcttttttttttctttctcctggccttttggggcccttgaagtgtctgctccctgggagcccttcagcttgtcgtccacttggtgggttcccacccgtccttctcacttctgcctgaatcacacaggctacatgagaccttcacccacccccttcgccagcagctctgtggttcaagtttcctcaagggcaggggctcctggccatcttacctgtgggcctgagcatgggccgatgcttccaaagttcacactgggtgcacttgtgtggggacttccatgtgagtcatctccttgcaggctgccaaggtcctgtacagcagagacccaaaccctcttagcagtcttcagagtcagctatgtgtacaggaggcattaccatatcagtgactgtcagcaagcatgtgtgactgaaatggtatccagttcttacgtatttgttttgcaggcttcttggttcagcagacagaggccattgggaagttaagagaggctctcaaactttgagggtcataagacttcccctccctgcagggtgctgtttcctgaaggaaaatattcaattactattttctttatttaaaaaaaaaaaaaaaaaaa

SEQ ID NO: 110 - DNA, 586 bp, Homo sapiens
gcatgatcctgaagcccaacttccacaaggactggcagtggtgtggccatgtggctcagccagcccatggggcagacctgcagaagcaaggtggccagcaaaagcaggctgcatggcccactgatatgggcccatccacccatagtaaggtgccccatgctgaggcatcactacaaagcacaagctggcaggggcctcagcttggaggagttaagggtggctggcatttacaagaaggtggcccagaccattggcatctctgaggatgcaaggaggaggaaccagtccacccaggccctgcaggccaaggtgcagaggctgaaggaggaccgctcctcactcatcctcttccccaggaagcccttggcccccaagaagggagacagttctgctgaagaactcgaactggatactcagctgacaggaccagaaatgcccatcggcaatgtctacaaggagaaagccagagtcatcactgagtaggaggaaaacttccaggccttgttagtctctgtatggcccatgcaaatgcccagctcttcggcatataggcacaaagagccaaggaagctgtagaagaggacgc

SEQ ID NO: 111 - DNA, 175737 bp, Homo sapiens
gatctgcccgcctcagcctcccaaagtgctgggattataggcgtgagccactgcgcctgacctttttttttttaaatcttttgagagagacgtagtcttgctctgtctcccaggttggagtgcagtggcgtgatctcggctcactgcaacctccgcctcccagattcaagcgattctcctgcctcagtctcccaagtagctgggattacaggcacctgccatcatgcccagctaattttgtatttttttgtagagacggggttttactgtgttggccaggctggtcttgaactcctgacctcagatgatctgcccgcctcggcctcccaaagtgttgggattacaggcgtgagccactgcgcctggcccacacatttttaggttataaaattaaacgtaatatggccaggtgcggtggctcacgcctgtaatcccagcactttggaggccaaggcgggtggatcgcctgaggtcaggagtttgagaccagcctggccaacatggcgaaactctgtctctactaaaaattcacaaaattagccgggtgtcgtggcgggggcctgtaattccggcaacttgggaggctgaggcaggagaattgcttgaacctgggaggcaggggttgcagtgagccaagactgtgccattgcactccaacctgggcaacaagagcaaaactccgtctcaaaaacaaacaaacaaacaaaacataatatgagactggacacagtggctcatgcctgtaatcttaacagtttggtaggctgaggtgggcagatcacttgagcccagaagttcgaaacaagccatgtcacccatgacatggcaaaactctgtctctacagaagatagaaaaattagccgggtgtggtggtgcatgcctgtagtcccagctactcaggaggctgaggtgatcctcccacctcagcccaggaggttaaggctgcagtgagctgtgatcatgccactgcactctagcatgggcaacagagtgagacccggtctcagaaaaaaaaaataataataatcaaatatatttgtgtaatacagatctactaatgggaagaactgaatttctctttttgaggttaacattttgcctaattgatgtacaaagttagtgttccagatggtcaaatttgactgtagatattcatgttcatgctgatctgtagagattgcaagtatttcatctttgaaaacatcttttcacacaggtaatgataggtgatatgtgaggtgcttgaaatgctgtgaagcacttacgactgtgtcactgtgacttgtagtgtacaaagcagcagtgcaaatcaggatgctgtagtcgctgtcgtgaccactcggctgtgtgttgtagagcaaaagcagccacagtattaagtaaatagtgtggccccgttccaataaaactttatttgttggatattggaatttgaatttcatacggttttcacagtctcaaaatattcttttgattttttttcaaccacttaaaaatgtaaaaaccattcttggcttgtgggctatacagaactagatgatgggccaggtttggcccatgggcagtagtttaccaagccttggtttaaagccctcatataagctgttgtagacattaagatgagttaaggcatatagtttagcacagcgcttagcaaaatagggagcgctgtgttcatcattgtcattcaagatgatcgttctctccaggtctggctgatgtgaggggtggaggtggtgtctgctttggatttctgctgttcctgagggagtatctgcattttccacagcttttctgtctgatttgtattttcctctgattccttttgtcatcaggtattcactgggcacctgctgtgggcagggctctgcgctgaggttctggagacaaaaggatgaatcgttgagcctgccctggtgtggtgctcccgttatcctttaggtataaaaacttgtggctattttttttttttttttgagacagagtcttgatctgtcacccaggctggagtgcagtggcacaatctcagctcaccacaacctctgccccccggggttcaagcgattctcctgcctcagcctcctgagtagctgggattacaggcgcccacgaaccacgcccagttaattttttaatgtttagtagagatggggtttcaccatcttggccaggctgatcttgaactcctgacatcgtgatccacctgcttcggcctcccaaagtgcaagtgttgggattacaggcgtgagccactgcacccggccatggctatggtttttgagaatgattggccaggtgatgcatttatttattttattactatttttcgagacggagtcttgatctatcacccaggctggagtgcagtggcgcgatctcggttcattacaacctccgcctcctaggctcaagtgattgttctgcctcagcctccaagtagctgggagtacaagtgcatgccactgcatgcgctaatttttgtatttttagtagagatggggttttgccatgttggcttggctggtctcaaactcctgacctcaggtgatccacccacctcggcctcccaaagtgctgggattacaggcatgagccaccacgcctagctcaggtgatgccattagtttctacacagttatcctctgtcatcccagactcaatgtgtccatcactggataggtcaccgcctcctaaagtttctcttgacctgctctcatctcccagaattttcctgtcacccagaatttgactcaggtacacaccaccacacctggataatttttctattttttgtagagatggggtttcaccatgtagcccaggctggtctctgtcttgaactcctgggctcaagcggtcctcctacctcaacctcccaaagtactgggattacagagtaattactgtgagccaccacatccagcttggccaccagcttattcaaagtctccaggatgctgggaccaccccccccaccacccgctccctgtttttgcataattgtatcttttttttttgagacggagtctcactctgtcacccaggctggagtgcaatggtgtggtctcggctcactgcaacctccacctcctgggttcaagcgattctcctgcctcagcctcctgagaagctgggactacaggtgtgtgccaccacacccggctaatttttgtatttgtagtacagatggaatttcaccatgttggccaggctggtcttgaactcctgaccttgtgatccacccgcctgtcctcccaaagtgctgggattataggcgtgagccaccgtgtctggcctttgtaattgtatctttgtgaatgagtgatttggttctgccctttttactccatatttataccagcctggctctaggagagtcagaaggcctgcccaagggtttctgccctctctgggccactgggccaaagctgtagcttgccctccgtgggctacctgggtcagccactcctgtgcttagggcttaatcactagttcgctgaggcctgaagtttaatcaacaccttgaggctaaacagctctggtccttgtgatcttcagcccatccctgcttttctctggtcctcctcaggagcttgtcaggccacgggggctccagtgatgaggctgaccatctttcttaagaggtgttctggtagcttgtattatgattggattgcgttgacttctcaaagccgaactgctgcttactagtagtacagtagactcccatttggcactgggctggtctttacccaggggtcccatagatgggtgtgtggaggggagaagagccagcatgcatccttgagttgttagttcaccaaaggatgtgaccctgtgttccacgagcgctcggtaattcctggtttgcactgatggcctttctctttggtaaagtcagggcgctgattatcttgtcggaagtatccagctggtcctctcttgggctccatcactgtgcaagtctctgctcataagaactcttcagttcccttctcctgggttcacagccaaggcaaaaaagagactccttggcctcttggcaaacatacatcccctacctggctggtcccccttcagcttccctctctaaggaacaacttgaacatagaaactccaacctcacctgtaatcccagcactctgggaggccaaggtgggcaggtcatttgaggccaggagttcaagaccagcgtggtcaacatggcgaaaccctggctctactaaaaattagcggtggtggcgcatgcctgtaatcccagctacttgggaggctgaggcacgagaatcacttgaaccagggaggcagaggctgcagtgagccagggtcatgccactgcactccagcttgggcaacagagagaccctgtctcaaaaaaagaaaaggaactccaacttctgaaagtaaacaacttatgcagtacatgattcctggagaggatttggtcaccaaccttccctccttccttccagggaaagcacacagaggggcagggcaagggcctccagtgcattacttcaccacttccctgagtaggtcttctcaagtccttggagccttcactttgtgatttgtcactgccagagagcaatgttgggatcatgagctgtgggtcctcagtctgactttaaagaaacctcacaaattgtctgctcctgattttcctgaccatgtttcccaccaatcctaacaaacctctgcttccctctcagtctcaacactctggtgttaatgcatttgaacctgctgtgtatctacttcctgtaattttttgagaattatctagaatggctcaaatcccacctttcccatgaagcctttctgaccactgcacatgctccttccccttgctgggctgtgtgctgcatgtgtgtacagggggacatcacatttgggtgcagcctgtcgtgtgggcgttccttttgacgcccgtgtcttgagagggctgtgtggtgttagcaggttagaggcagatgctaaagagacaggcctgaccattcactgacctagctttcctttccctgagcttcagtttcctcacctcttaaagggaaataaaaatagtatgagttgtgtgcagcttaactgagaggatgcctgtggagtgttcagggtgatggcagtggttattactattaatctttttctccccagccagacttgatgcctggacttggccacagcttgcttggtaaacccatttactgacatattaattgatccctcttctctcaccaggtacatggccacctctggcctagaccaccagctgaagatctttgacttgcgagggacgtaccagcctctgagcactcggaccctgccccatggagcagggcacctggccttctcccagaggggactgctggtggcgggaatgggtgacgttgtcaacatctgggcagggcagggcaaggccagcccaccctcccttgaacagccctacctcacccaccggctctcaggccctgtgcatggccttcagttctgcccctttgaagatgtgctgggggtggggcacactgggggcatcaccagcatgctggtccctggtgagtgggccaggggatggggcttgaagtgaatgaactctgggtggaagtttgggccagagacatccaggaactgggggcttagttgggctggagctgttggactgaggttcttccttatggctccatgcttctccctccctcccttcaggggccggtgagcccaacttcgatggcctggagagtaatccatacagaagccggaagcagcgccaggagtgggaggtgaaggccctgctagagaaggtgaggctcccctgctggagagggtgagatcccccccattgctggagagggtcaggttcccccgtcctggagagggtgaggttcctccttcctggagaaggtcaggttcccccctgctggagaaggtcaggttccccactgctggagaaggtcaggttcccccctgctggagaaggtaaggtttcctcttcctggagagggtgagattcccctctcctggacggggtcaggtttccctctgctggagagggtgagattccccctgctggagagggtcaggtttccctctgctggagagggtgaaattccctctcctggagagggtcaggttcccccctgctggagagggtgagattgcccctgttggaggtgaggttcccctgctgcagagagtgaggcccctgctgctggggaaggtgtggtttggggttggaggtagagaaagctctcctgatgtctcatgctgggggtcttgggtagaggggttcagcagcctccctggcttctctttttggtgctaccctcctgtggctccttgctgagtcctgtccctctgtgacacccccaggtacctgcagagcttatttgtctggacccacgagccctggccgaggtggatgtcatctccctggagcagggaaagaaggagcagatagagaggctggtatggagcaggcccctgaatgcccaggcccgtcttctcccccacatcctctccccaccatggcttgtccccagaagtgcggccagcaggtgggtgctgccagttccctgactccgaggctgtaacagatatcactcctgtcccctccctcagggctatgacccgcaggctaaggctcccttccagccaaagccaaagcagaagggccgcagctccacggcaagcctggtgaagaggaagaggaaggtcatggatgaggaacacagggtaaatgagcattggcatgggccgggccttccacaggctgcaccctcctgcttgtgcctctgcccttgtcagcctgccacttctcactctgtgcctgtgtcctccccgtctccggtccccaggacaaggtccggcagagccttcagcagcagcatcataaggaggcgaaggccaagcccacgggggcccggccatctgccctggacagatttgtgcgctgagccagactccagggttgcctgggaacagtctctccccaagatcacctgtagggaaatgagtgttccctggaacaaggaggtgggggcagtgtggccccttccccaactgggggtggacagctgtctcctggggtgggttggtattaaagaggaaagcgattttttggataatgtgtctggatcatcttgtggacctgttcccctcccccttgccaagcatgaggccattctaggatcggaggggtcagtgtcctgcctctacccccaccccataccttgtggctgctgtggccttagctttgccttttaggggccttcctcctcagagaggctgtcctctctcccatgtccctggagatgtccttcccatgcagcagggtctggcagcctctgggctctccaggtttgtggtgttctgggggtcctggtgaagaccacactgcactcgaagaagtggagacaagtttattgaggagcttgacacccctcttctgccctagcttgagagaacaactgcagcatttttttctttttctcttcccgatgaccatcttttgggctggcgggccaggcccctgggtgtctcccatatcgctgtctttagtgagactgaggatctggtataaggaaacagatcagctgcagccagtgagggcccctgcgttgggcctgggagagagaaggtcctgttcctgcctttcctgtggccccaggcactctcagctctgaagccaggctattgctcgacaccgcaggatgcccaggactccctggaaccaggagcaaaagggcgcagtcctttccccgtcagagccacccaccagcttccaggcttcctgcatcttccaggggtccagcctgtgggacgtcagcaggaatttcccatagcagcaccggtctagcgggtagtgggtggcaccagccagcttgacacactgtgttggggcgaggcctcctcgtcgggcacttacccccacaaagacatcctctaatgggagaaggggtgcccggctggccaccttgagaatgagctgcacagcagacgctgacagcacataccccgtgcctgaggcatagggtggaaaggggccccaggtgtgaggccactgctcctctgatacgcggtgcctgccccccggtgtccgagaggggttcacgcgccagtgcacccggcccaagtacagaagaggcacttcctcgctgtgcaaaacctggcctccttcctgctcagcctctctctggggttccgtgcttctctcccattgcccccaacggccccctcgcaagaccagctctgataccagttcagggacgttgacatacacatcatcgtccgtcttgaggacgtatcgggccatggggcagtgtttctcagcccagttcagcccgctgagggtctttagggtgaggttgcggtaggagtcctggaaggcggcctgcaagatatccccctgggctgctgactccgaggccaggtcactcccctgggaaccccacacggggtgctgtgcgttcggctctcccagcaagaatagcgtctgtaccctgagcccccgggcctcgcgcagcccgccccacgaagcccgaatggcgtttctctggttcaggttctccggagccgtgcacaccaggatgagcaggaagggaggggccccgggaccactgcaagcttcctggttggggatcaagaggcggggcagggccaggggcggccccggtgaggcgggggctgggagcagggaggctagtgagaggctcagcagctcctcccccaaccccgaaggcccgaagagggtccagacgatcaccagcagcaaagcggcgagaaggaggcgccggaagagcctgagctgcatggtgcggcgtactccgaggggatccgtaagagcgaagggcggagactagctccccgggcctgggtcacggccggggacttaaccgaccacgcccgggatgcggaggtctgagcgcgcgaccgggaccagcgcaccctggggggcggggagaggcggtgcagctgcggaccgcggtcgaggcatgctgcgggggtggctaccttgtcgccgcggcctcgccgccagcaagctccgctccatggctggccgactgcggcactcacggcccctcccccgcctcgccccggcggccggtctgccgcccgcttccgcgttgcgcgctcccatccccgccggaagcggcgtcggagcagcgcggcagggcgcggaaacccgggcgggtggagtggcaccaaacggagtgagaccggtctgtccagccgctccccatcccaacccaccgacgtactccaccagggagaccacacccttcataaccaacgtccgcgtttttgcctttgttgcttcggtcacagcccgaaggattttcccttatgactagatgaccccttaaaagaaaacaaaaacaaaaacaaaaaaacccagagtgaccaagacctgcaaactcaccttaactgcaactggctaggctcagctaacccactccacaatgatgctgcacaccaaccccagggtgttggtctctaaactggtctgggtcagcccctcaaggctgaactgttttaccctcacatttctctttacagagagggacatcactagctacatatagggagactggggggtctgcagcatcaccactgctaaaactaatagcactgtgtgggcaactgagtagggcagctctaaatggaaaaaggacccagcactttaacattccctattagaatggacagaaaggacaggaagccataggtatataaactatttattaacagacaaggcctacagacttatttcttcttggacacacccacggtgcggccacggcggccagtggtcttggtgtgctggcctcggacacgaaggctgcaggtaaaaagagaagagtcacaggtcatgcacagcagaaacaaaaggttggggaaaaagaagagcgagtaggaggaatgctgagtcgaggtaggcagggagatgagaccccccactcacccccagaagtgacgcagccctctatgggcccgaatcttcttcagtcgctccaggtcttcacggagcttgttgtccagaccattggctaggacctggattcagaggagggggcaagggatgttttatcccctgacctcctatgcccaattctgttaggaccctccacccttcctctaatcctgccctcatttcagtacacacctggctgtattttccatcctttacatccttctgtctgttcaagaaccagtctgggatcttgtactggcgtggattctgcataatggtgatcacacgttccacctggcaggcagaccaaggtcagatctagatggacccctttctgaggctgaccccacccccagcccccttccttgtcctcacctcatcctcagtgagttctcccgccctcttggtgaggtcaatgtctgctttcctcaacaccacatgagcatatcttcggcccacaccctgaatgaagtgaggggtttcggaattagtgttgaatctgatttttaaattcctttatagcctcattcaaaaagctcacaaaggtaggatctgcaataatctattttgcaatcccctaggtcaccctttcctcacccacctttccagatataaaccgttcgacagaaggttaactttgggccggtcgcagtggctcacgcctgtaatcccagcactttgggaggcccaagtgggcagatgacattgagggcaggagttcaaaaccagcctggccaacatggtgaaaccctgtctctactaaaaatacaagaaaagttgctgagcatggtggcaggtgcctgtaatcccagctacttgggaggctgcagcagaatagcttgaacctaggaggtggaggttgcagcaagccaagatcacgcaaccacactctaacctgggcgacagtgagaccccgtctcaaaaaaagaaaaaagtaactttgttcaggggtatgactgaatcatgaacacagaatttagtattacagacaaccctttgaaagcaggcagtatcttttttttcccccattgctcagcatatgtagttgtcactaagtgccttctgattcttgcatttaggagaacaaggggcctgccactccaagctgatgcagtaaaccagggtcttatgagttacaggctttgattaaggtattgggctgtcagttcctcagaatctctaagggtcacaattatttaggcaaatcactgtatccccataatcaaagtattccaagatcacaaactcaattttgtcagtgcccagaactgactgcccaagttattataaaaagaaactaatgcttacattggtagcatcacatcaacaccagcactagcacccatgccatctgaactcatgaaccaaagtgatttggagagtgaaggaggaactgaatactgagccctgcccctcattttgtccaactagaacatcagaatgtggccctatttggaaataaggtcgttacggaaataattaggtaaaatgacgttatatttgattagggtgggctctagatccaatgacaaatcatgagagagacacgaagaggaccatgagatgacagcaacagattggagtaatgcagctacaagccaaggaacactaaggattactgacaaccaccagaagacaggaagaggcaaggtaggattcttaagtgcctccagcgccaagagtaattttctgcttagtttatatgaacttgttacagtaggctccaggaaactaaaacaaatggcagttcctatctgcaagaaagagatcaagggttggcttcaccgtggctcatgcctatatgcctgtaatcccagcactttaggaggctgaggctggaggatcactgagcccaggagttcaagaccagcctggacaacacagcaagatccagattagccagatgtggtggtgcacacctgtagccccaactacttggaaagttgaggtaggaggattgacttgagccctggaggtcgaggctgcagtgaagagtgattccgccactccagcctgggcgacagtctcaaaaaataaatgtggctgggtgcagtggctcacgcctataatcccagcactttgggaggctgaggtgggtggatcacctgaggtcagaagtttaagaccagtttgaccaacatggtgaaaccccatctcttctaaaaatacaaaaattagctgggcgtgtgcctgtaatctcagctacttgggaggctgaggttgcagtgagataagattgcaccattgcactccggcctgggtgacggggtgagactctgtctcgggataaataaataaacatgaccaagggtcaaattattaggttgattcagaagagagcagggtctttcaaatttattaattaaatgacgaggtttcaccatgttgaccaggctggtctcgaactcctgacctcaggggatccgcccacttcagcctccgagtgagccactgcactaagcctcaaatttaattatatgtttacaagtgaaaagatttacttcaaaatgggtgtgggaagagatatagatgaaataagatttctaatttttagttagatacatccatgaaggttattctctattacacttatgaatgctgcacctctacttaagcctcacagccggtctctgaaataagtacagtatttcacactgccttattagtttcacagagcacccaacagaaggaatttccctctacaaattcctcaacagagccaacagtatccctactactatccattccctaacgtcgcctaagtacctaccatgcaacagaagccaagaagacaggcctagccctgcacgcatggacacatactggtaggctatttccacaactaactacacattctgacttaagggaaaaaaaaagaacgttatgtatctagaaagccaagaattcattaggtttgtggagagaaatactcaagtgaaataatattcttgcattcattgattcgattcttaaaagccaaagaaagatggatgtactccttcacacttcgacaggaaaggagtgtcaattatggctcatctgagtaaatgtcccactcagacttcttccaccctccatctacaggcttcttcacactttttatctgttggtatttctacttatccctcaagatgcccaataatcctccaattctcagggaatataaatttcgcaggaagggttgctgttatgatggtgggatgggtaaagaaaccgaatctagaagaaatctcacaagctcgtggttcaggaaaatcttagcgaattcgggtgagcaaccatacctcctccccacttccccaggtgaaatgttttggcttgaccttagaccactatcttggctttaatcacttattttctgtggtaaatgctaaaggggtcagtctctccctaaaccactttcttttcttaatccagcagtcaaggtgatctggatgagactcaagtctccccagccttgcttcatttttgcttatgtcttcacaacccaattctcatttacattccctattccttaccctacttcacttaccttaatggcagtgatggcaaaggctattttccgccgcccatcgatgttggtgttgagtactcgcaaaatatgctggaacttttcagggatcactagagactagttgaaaaagtacgggggaagaaatcagacacagtaaactatcaaacagtaaggccgataaggcaaacgaacttcatacaaaaaggttaagcctgtcacacaagtggcaagacacccgccccccattccttaggttttcacaccacagagcaaactcctcagtcctgcagagtaggcacatgaagcgttcaagcttgggaaaatgcaacctctggagagaggaagcaggtctcctgcccattcccaaaagtgcgtggcaaaagccagagttccccatatacgcccaagccttagacagctttcgtgcgcccgagcagtgacccttcctcgggcccgctctccggaattggaaatctttggtgtccctttccagggacgcgatccaaggctccatacagaaagtcgcaggccctcagggcaggacgtttccagaaccctgacagccggctttccttgcccgagctgcgatgccgctggatcacggcacggattccagtcttaccatggctgcagcacaagcggcggcgtgtaggcctcctgtggaagagagagcggaagtgacgcgatatcattatatagcttccaggaggaagaggcggtgcgatctaggagaagtgcttccggaaactgtttcagcgcgacctggctggatttatgagagtatggcttgggtaccacaacttccggtgcgcctttctttacagttcgtaaggttcataggtaagagaacagcgaaggttccggggctagtttgtgtttcagacttccatatttccatttgcagttgggtgaagtggttagagctgaaaggggacagctggagtcaaacaacttaactcaaatatctgggaacgatttcgcgctgaggaagaccctttgggacttgtagctccactccggggaacggactcgccgggactgacagttgccggaagtgaggctgcggggaatggccgccgctgcgaccatggcggctgcggcccgggaactggtgttgcgggctgggacctcagatatggaggaggaagagggcccgctggtgagagcgcggagctgtttctcctccgtagttccggtgctcctagcttcagaaagacctgagctgggtttaggcacaagggtgggaacttggctgctacccgtgatattacctgtttggctccccgtacccttccctgtgatcagacccgaccctgagcgggaccctagtggctgaaactcatgttctggggcacaaaatttcaacttcactccacattttggggtagagtcacgaagtagtatagtgtaaaggttaagaacatggcctctgaagccagactgcctgagttctatctctgccacttacacgctgtgtgcccttgggcaagttaaccagcttctctgtgccatcatttctcacacctttaaggtgaggaagatagaacctattgtatacatcgtcgttaggattagatgaatatgtgtaagattgcacctggcatgcaggtaaacactatgtgttttgacatttctagaaagcctggggttccccagaggtgtgatagaacacccaagatggcaggagtctgagggtcttaaatttaagtgcaagttctgctctatcctctgcaattcctagctttcctcattcggtcatctccactgcacttttttttttttttttttttttttgagacggagtcttgctctgtcgcccaggctggagtgcagtggcgcgatcttggctcactgcaagctccaccttccgggttcacgccattctcctgcctcaacctcccaagtagctgggactacaggcgcccgccaccgcgcccggctaattttttgtattttttagtagagacggggtttcactgtgttagccaggatggtctcgatctcctgacctcgtgatcttcccacctcggcctcccaaagtgctgggattacaggcgtgagccactgcgtccggcctccactgcactgtcttgtcttttacctttttttgttttctttagacgggtttccctgtgttacccaggttgaccttgaactcctgatctcctcaaacaatcttcccgtctcagcttctaagtagttgggactacaaggagcccaccaccatgctgggctacctccactgtctcactggatcgtctcactccttgtcgtattccttacccatcagcacaaaataggagagtgggtacaacgtgagactcttagaatttttcaaagcagtacctgtggctcccagtaaaagcagctccttctcacttgaaggactggggatatccaattatattttttctttctgtctttcaccgtaccctactcccattaacttatccctttccaggcgggtggtcctgggctccaggaaccactgcaacttggggagttggatatcacttctgatgaattcatcctggatgaagtggatggtaagcgatggcatggggtgggtgcagtacctgtaatctgagaggcatgggggctggaaggaataaggtagggattggtgtgcagatactcaatgtggggagagggagctgtggagctggacccttatgataaacttctatttccagttcacattcaggcaaatctggaggatgagttagtaaaggaagctcttaaaacggtgaggctttcccctgtactaatctgcccttctatctattctaccccaaaaggaaaaacaacagtctcttgcttttgttgtatcagcctggtatctgaccctttagtccttcactgattctgttacagtgtccctttactgagacttccttctgacctgtcatctttatgttctcccagggtgtagatctccgtcactattcaaagcaagttgagctggagctacagcagattgaacagaaatccattcgggattgtatcctccagcagagggaaggggtggtgctattgacatggggattttgtggcgtgtggtacagatgtcccagctggggtcaacatctctgaggtttctatcacttcaaagagaaattggagaggtactacaaatctgaggatctcccatcttcaccatgaggccccttgactttttgtggatcagatattcaagagagtgagaatatagcatctctacacaaccagatcacagcctgtgatgctgtcctggaggttagtaatcatgacctgtgacccctaatagctactctgaaccagatcatggactctggtgccatttttaggtcatcagcctcaagatggggacaggttagggtcattttcaagatgacttcaggagccttttttgttattactgccatatttaatgttatttcctgataatctggggtgtctcatcatctgccaccctcaaggactgataaatactgaagacttcacaaagagtctttggtggcccacttatcccctacaaaccctatagcactccggcaacatctaccctccctacagcgaatggagcagatgttgggagcttttcagagtgacctcagctccatcagctctgagatccggacactgcaggaacagtcaggagccatgaacattcgacttcgaaatcgccaggcagttcgggggaaacttggggagcttgttgatggtctggtggtgccttctgctctggtcacgtgagttaccagtttgaagggttataatgtccatagcaggtggatgggctggggtgacccaccctatttaccatatgggtctcctggctccaggttaagtgctttttagaaattagtagccaggttaaccaccatttctttaggtatgcattaggcatcaaagattaagattaagaatgatgtaagatcaggtgtatagtggggaggtccaggaatagaaaactttgtacatgtgtcctgactatatggtacaatgcaaggtggtagagatgacaggggctggaggtaaggagtgtggtctgggtctggtttagggatgtctgggtctcccttgtaactcatcccacccctccctgctaaccagggcaattctggaggctccagtgacagagcccaggttcttggagcagctacaggagctggatgccaaggcagccgcagtcagagagcaggaagctagaggcacagcagcctgcgcagatgtcagaggcgtgctcgatcggctccgggtcaaggtgggaagtagggatggataccctggaggctactggaagcagccttcccaagatcttcactatggatttccttggcagagctcactgtagcctgtctccagggacttcaccctgccttttctgggcagccccattcttgtctctctgggtttccctgaaaatcttgagaaataccaaagagatattcaccacccttctgcctatgtttaccatttgttgcttcccccagttcctctcatacagcaaaagggttgcagcttcatgccctgtgtttggttccccacatctaggcagtgacgaagatccgagagtttatcctccagaagatttattccttcaggaaacccatgaccaactatcagatcccccagacggccctgctgaagtacaggtcacaaccccaaggaagtgcatgggatggcctttgagtttttgagcggcctagtgtgggcatctggtttcttgggagacaggtagactgacatgttcctgaccccctaggttcttctatcagtttctgctgggcaatgaacgagcaacagcaaaggagatcagggatgaatatgtggagacgctgagcaagatttacctgtcttactaccgctcttacctggggcggctcatgaaggtgcaggtaaggtcaggagggagaggtattcctgggcacatggactgggaggaggggacatccctgggcaaggaatattttattgtgttgtgggaagagacggttatcagttctcttttctctttccttagtatgaggaagtcgctgagaaagatgatctaatgggtgtggaagatacagcaaagaaagatatcctagtactggggaaccctcatgccaggccttgagagtgggaggactttcgactccagccaccaatgcactgctccttaccttttcctatgggactgaaaccttttagaatgtgatgaaagctatagcctccctccccagaaagatgcacacattattttgacacatagttttgcatatgattgcaagggagggagagacaccctgaagcccattcacagatgtcagcacgtggggccctagtactgggaaagagggctggctaggccacgtctgcctgtctggggtccccacagatagtgagtctttgggcccagttatggtctcattgttttccctgactctgacccatcttacgattcttctcaaagccatcgctccgcagcaggaacaccattttcaccctaggaacccgcggctctgtcatctcccccactgaacttgaggcccccatcctggtgcctcacacagcgcagcgcggagagcagagggtatgaggaggaacaagcttcagtcacgaaagaggctctgagcacggtggggagggaaggccagacctcagggcagagcttcccaacctgcaggccctgtcttaatccccttagacttgggagtggccttctccaatcactccagcctgctgtgatgtgaaaagagctgggaaccattgacttaagggcatgcagaggggagagactggatgaggggaatgacagtcagaggcaggtgttgaggtggatgcaggagtagcaacagcaggtgggtgtaggccctttttgtacccctatgttcccccaccttttcagtgcccattcagcttgctcttagacagcccggacctagatagatgcgaagggtctgcctagctcttattactcaggtttactgattttccagccatatccatgggaagtcagtgttggggtccatcccttctgtttttcttctttactcctcctctcccagtatccatttgaggccctcttccgcagccagcactacgccctcctagacaattcctgccgcgaataccttttcatctgtgaattttttgttgtgtctggcccagctgcacacgacctgttccatgctgtcatgggccgtacactcagcatgaccctggtaagactcctgtttcctgtaccattcaacacctttgtccccagtcttcatcagcagcatagtggggtcatgactctggtagaactgaaatcaggatcgcctcattctaaaatgtctaagccttggctgggcgtggtagtgcacacccataatcccagcactttgggagtccaaggcagtaggattgcctgagctcaggagtttgagaccagcctgggcaacaacctcatctctacaaaaaatgaaaaattagccgggtgtgtgttgatgtgtgcctgtggtcacagctactaaagatgctgaggtggaaggattgcttgagcccaggaggtcaaggctgcagtgagccatgcactccagagtgagacctgtctcaaaaaaaaaaaaaaaaaaaaatagccaggtgcagtggcttacgcctgtaatcccagcactttgggaggctgaggcgggaggatcacaaggtcaggagtttgagaccagcctgaccaacatgatgaaaccctgtctctactaacagtacaaaaattagccaggtgtgcgcggcctgtaatcccagctactcgggaggctgaggcaggaggattgcttgaacctgggaggaggagattgcagtgagccaagattgcgccattgcactccagcctgggtgacagagcgagactccatctcaaaaaaaaaacttgttacttagacttgtcacagtgttactcccccatgaaatcctcagtgcgtagggtccctgagactacccctactgctgacccacaatcaggcaatagcacgtgaaaactgagggtcccccaaatcttggtgctcaaacccctgacccaagctcagccctgaactctgctgtgataggcttgtgatcatagatcctggtgtggccaggtgcagtggcttatgcctgcaatcccagtactttgggagaccaaggcaggaaggttgcttgaggccaggagttcgagaccagcctgggcaatgcggcaagaccttgtctctacaaaaaatttaaaaataaacttaaccaggcatggtggtacacacccatggtcccagttgcttggcaggctgaggtgggaacatcacttgagcccagatgtttgaggctgcagtgaactatgattgtaccattacaatccagcctaggtgacaaaacaacctgtctctaaagccgaaaacaccgggtgcagtggctcacacctgtaatcccagcactttaggaggctgaggtgggcggatcgcctgaggtcaggagttcgagaccagcttgaccaacatgatgaaaccccatctctactaaaatacaaaaattagtcgggcgtggtggcaggcgcctataattccagctactcaggaggctgaggcaggagaattgcttgaacctgggaggcaggcggaggttgcagtgagccgagattgtgccactgcattccagcttgggtggcaagagtgaaactctatctcaaaaaacaaaaaaaaagccaaaaacatagatcctggacaggaaagcagggggcagttccattttacgtctctcccttctgtcctgtccagtgcatcatccccaaagaaacaaatgcgtttgttcatagtcactgaggacaacaaactgacattctcttttaatcctctgtttgttccccaatcacacagaaacacctggattcttatctagctgactgctacgatgccattgctgtttttctctgtatccacattgttctccggttccgtaacattgcagcaaagagggatgttcctgccctggacaggtcactgaattctggtccttgatgcccaacaggccacgaactctcttggtcttgcatgactctgccctgaccttagactcctactgacctggtatcatcaacctttattcccattcatttgctccggaggcagtagtgctgctttttgactcacctttctccaaccactgccccccaacccccacaactagctattgaccattaaactgaatgatgccccactccctcccatccccctccaacattccttgctggctgacctctgattctgattaagcccacaggtactgggaacaggtgcttgccttgctatggccacggtttgaactgatcctggagatgaatgttcagagcgtccgaagcactgacccccagcgcctaggggggttggatactcggccccactatgtgagggagggcaagggtaacaaagggttcttgaaaggcagggctctaagcatcattgtgggggttggccaaggtcacagttgtgtcatgggccacgctatgagcaggtgttctgggagggtggtgaaactcatggtgagtggtgcactgtgggtaggagggactgaaggtagagtcacatcacatggaggtgggttggctaaggaagttgggaggttgtgttggttgggccaggaggtgggtgtgattttccttcccactctctcctagatcacacgccgctatgcagagttctcctccgctcttgtcagtatcaaccagacaattcctaatgaacggaccatgcaattgctgggacagctgcaggtgagggtcggacaggagacacttcccagcagcagggctgcttccagtgggtggagtctgaggaggagccagatggggcccagatgaccttgctttctggtgtcacctcttcctctctgccttttcaggtggaggtggagaattttgtcctccgagtggcagctgagttctcctcaaggaaggagcagcttgtgtttctgatcaacaactatgacatgatgctgggtgtgctgatggtaataggtgctccttctccttgccttcctacccagaaaattcggtttcccccactgctgttagctctgtgagggcagagatgatgcctgtcttgttcagtgttttactcttggagtctggcacagtgtccagcttagtacaataagtgtggaatgaaggggacatcctgaagtgaaggactgctttccccaaactagacatttccctttgtcttcccttaggagcgggctgcagatgacagcaaagaggttgagagcttccagcagctgctcaatgctcggacacaggtaggggtgtggggaaaagggaagagacagccttctgtgctgttttcagctctctctctctctctctctgtgtgtgtgtgtgtgtgtgtgtgtgtgtgtagggagtggcataatggatctcaggtatgcggaattactgtaactcttgattcacaacatactgtcattattggtctattttattttattttgtctttggtttttttttttttttttttttgaggcaaagtgtcactctgtcacccaggctggagtgcagtggcatgaacatggctcactgcagcctcaacagcctgggcttaagtgatccttctaccttagccccctgggtagctgggaccacaggtgcgagccaccatgcctagctaattttttatttttagaatgaattttatttttttctttatctatcctctcaagcatttatcctttgtgttataaacaatccgattacactaagttattttaaaatgtacaattaagttataattgactatagtcaccctgttgtgctgtcaaatagtaggtcttatttattcttcctatttttgtttgtacccattaatcatccccaccttctccccagccttccactagccttcccagcctctggtagccatccttctactctcttcgtacatgagtacatgagttcaattgttttgatttttagattccacgaatcagtgagaacacatgacgtttgtctttctgtgcctggcttatttcacttaatataataatttccaattctatgcatgttgttgcaaatgactgagtctcattcttttttatggctgagtagtactccattgtgtatatatcccacattttctttacccattcatctgttgatggacacttaggttgcttccaaatcttagctattgtgaacaatactgcaacaaacatgggagtgcaaatatctcttcaatgtactgatttcctttcttttgggtatatacccagcagtgggattgctgaatcatatggtagctctacttttagttttttgagcaaccttcaaactgttctccaaagtgtttgtactaatctacattcccaccaacagtgtataagggttcccttttctccacatccttgccagcattgctattgcctgtcttttggataaaagccattctgactggagtgagatgagatctcattgtagttttgatttgtatttctctgataatagtgatggtgagccccttttcatatatgtctgtttgccatttgtattcttttgaaaaatatctattcaaatcttttgcccattttttaataggattattagactgtcatgtagagttgtttgagccccttatatattctggttattaatcccttggcagatgggatgtgcaaatattctttgtctcttcactttattgtttctttagctgtgcagaagctttttttttttttttttttttttttgagatggagttttgttcttgttgtccaggctggagtgcgatggtgcgatctcagctcaccgcaacctccgcctcccaggttcaagcaattttcctgcctcagcctcctgagtagctgtgattacaggcatgtgccaccatgcctggctaattttgtatttttagtagagatggggtttcaccatgttggtcaggctggtctcaaactcctgacctcaggtgatctgcccagctctgtctcccaaagtgctgggattacaggcgtgagccaccgtgcccagctgtgcagaagctttgtaacttgacgtgatcccatttggccatttttgctttggttgcctgtgcttgtggggtatggctcaagaaatttttgcccagacccgtgtcttggagattttccccagtgttttcttgtagtagtttcataatttggtcttagatttaagtctttaatccatttgatttggttttcatatgtggcgagagataggggtatagtttcattcttctgtgtaatggatagccagttttcccagcaccattattgaagagactatctctctttttttttttttcagacggagtcttgctctgtcacctaggctggagtgcagtggtgcagtattggctcactgcaacctctgcctccttggttcaagtgattctcctgcctcagcctcctgaatagttgggattactgatgcctgccaccacgccgggctagtttttgtgtttttagtagagacgggatttcaccatgttagccaggcttgtcttgaactcctgacttcaagtgatcctcccacctgggcctcccaagtgctgggattacaggcgtgagctaccgtgcctgaccaagagactatcttttccccagtgtatgttcttggcacttttaccaaaaatgagtttactgtaggtgtgtgccagctaattttttaattttgtaaagacagttgtctttacaaaagacaactgttgcctgggctggtcttgaattactgccctcaagtgaaaaatcttatgattcttttttttttttaaagacggagtctcactctgactcccacactggagtgcagcgatacgatgtcagctcactgcaacgtccgcctcccaggttaagtgattctcctgcctcagcctctgagtagctgggactgcaggcacgtgccaccatgtccagctaatttttgtatttttagtagagatggggtttcaccatgttggcccagctggtcttaaaactcctgacctcaggtgattcacccgcctcagcctcccaaagtgctgggattataggcatgagtcactgcacccggcctagattctgtttttaatgacactggaaaacaacgaatttttgttttggcatatatatagctttacttttaaaagcaagaacacacacaaaaaaagggggaaaaaagcaagaacacaataaatgcaacatttagatcaacgagtacctgtgcacgagaagcacagggatggtttcagtaggatttcatagtttgatggtgacttttgccaagctgctgctacttggattgtgtggtgtgtttgtgagtgtttatatcattaaaaaacaaaacagccactgcactgggttgttttattttttaatgatataaacactgatgagacaaggcaagaaaacagcaaggcaaaaaagaaaaaaaaaaaagccaggcatggtggtatgcacctgtagttctagctatttgggagacaaaggcgagaggaccactttgaaatccaggagttcgagattacagcgagccatgatcatgacattgtagtctacccttggcaacacagcaagaccctgtctcaaacagcaaaacaaaacaaaaaaccccagaatcacaggatttttttcatgcataatttttctaatattgtcatgttattgcatatggctatagctcattccttttcactgccatatatgacttgtgtgattaaacatattctataaatggattgtttccagtttcttgcttctgtgagcattgttttatgaataatcatgtcttttagcacacatagatattgattatcttcatcaaaagtttctcttgggtataaacctaggacagtagtcttgctgctaataagatatgcagtattagtctttatgagacaatgataaattgttttcctaagtagttccttctcaccagcaatatgtaagaattcctactgagccacattttctccaacatgtggtattatcaggtctttgccattttttttctttttttttttagagaccaaggatgctgctaaagatgctcgggatcagaaatgtttcagattttgatttttttcggattttggattccttgcattatttttactggttagcatctgtagtctgaaaatctgaaatctgaaatgctccaaagagcattacctttgagcatcatgttgatactcaaaaacttccggattttggagcattttggatttcagattattggattagggatactcaacctgtatttcagtgggttttatttgtaattttctgattactaataacattgagcatcatttcaaatgtttagtaactatatgtaggggttcagtcaggctggtgggaaaaatattagtgatgatagccacaaaccctcttggaaggcctaagagtttgcataacttcagtaatagatatggttgaaggcgacctgatctttacctttagttaaataaattagagtaataacaaaggaatgtggggaagttatctaggtagcttgtttactcatatggtcttaagactaatctttgatgtaccgcaggtgcttaactgctttctactcaggaagtccacaatgtcagttaccccgtagtggtgttgactcaagtctttgtcaattaatctttactgaataaatgcgagtctcactagctggtcagggccgccattgcaactgtttacagtactcttcagggagtctgtaaacagcctggacacactcagctggactggcaaagcagagtatctgtgtgtcagtgtacctcattcatccgttgccgggtcaggggtctgcaagggacagactccctgaagctggtgctctgtgtgaggagcgtcaccacaactatacaatttttttttttcctgtaaaatggctgtcatagcatttgaccttttaaaaatcggcttgtggctgggcagggtgtacacctgtaatcccagcactttgggaggctgaggcggatggatcagttgaggccagtaattcaagaccagcctggccagcatggcagaaccctgtctctactagaagtacaaaaattaaccaggcatagtggcgcatgcctgtagtcccagctcctcaggggcgctgaacctgggaggcggaggttgcagtgagccaagattatgccactgcactccagcctcagttacagagcgtgactctctcaaaaaataaagaaaaaaataagtctgctagtattttttatttataagagttctttgcatcatctacatactaatcttgttgattatacgtaggttacagattatcttttagtatgtatctttttacttttttttttttttttggtgagatgagggtctttctgtgttgcccaggctcctgggctcaagaaatccttgcacctttttttttttttttttgagatggagtttcactcatgttgccgaggctggagtgcaatggtgtgatctcagctcactgcacctctgcctcccgggttcaagcacttatcctttctcagcctcctgagtagctgggattacaggcgtgtgctaccacgcccggctaatttttgtatatttagtagagatgggttttgccatgttggccaggccagtcttgaacgcctgacctcaggtgatccatccgcctcagcctcccaaaatgctgggattacaggcatgagccaccgcgtccagcctttgtttttttaatgttgctttttgattaaagaaatttgtaattttaatatgattgaatttatctgtccttcatttttatgtctttgtttttagtaacagtcttgctctgtcacccaagctggaatgcagtagtgtgatcatggctcactgtagcctcaacctcctgggctcaggcaaccctcctccctcagcctcccaagtaactaggactacaggtgtgtgccatatgcccagctaatttttgttgttgttgttgttttgtagagacagagtctcactatgttgcccaggctggtctcaaactcctggcctcaagtgatcctcccgcatcagcctcccaaagtgctgggcttacagccaccatctaccacgcctgactatttttgtcctgtttaagaaattcctgggctgggtgtggtggctcacgcctgtaatcccagtactttgggaggctgaggcgggtggattacgaggtcacgggatcgagaccatcctggccaacatggtgaaacctcgtctctactaaaaatacaaaaaaattagctgggcgtggtgatgcgtacctgtagtcctagctactcatgaggctgaggcaggagaatcacttgaaccagggaggtggaggatgcagtgagccaagatcgtgccactgcactccagactggtgatagagtgagactccgtttaaaaaaaaaaaaaatgaaattccttattactccaaggccagaaaaatattatgctacattttcttcttaatattgtagaattttggccaggtgcagtggctaaagcctgtaatcccagcactttgggaggccaaggcaggaagattgcttgaagccaggagtttgagaccagcctaggcagtatagtgagacctcatctctacaaaaaattaaaaaaatatattagccaagcatagtggcacacacctgtagtctctgctactcaggtagctgaggtgggaggatcacttgagcctgggaggtcgaggctgcagtgagccctgtttgtgctgctgcactccagcctgggcaacagagtgagaccctgtctcaaaaaataataataaaattaaagaataaacaaatatatagagagaatttttttgttacctttaagtctcaaatttacttggaattaatttttgtgtgtgatgtgaggtagggatctatttcttttttttatgtggatggttggcccagaaccatttatagaaaatctttttcttttctttttttttcttttctttttttttttttttagacagagtctcactcttgtcacccaggctggagtgcagggccacaatctcagcgcactgcaacctctgcctcctgggttcaagtgattctcctgcctcagcctcctgagtagctaggattacaggcatgtgccaccacacccagctaatttttgtatttttagtagagatggggtttcaccgtgttggctaggctggtctcgaaaagttttcacattttaaaaagtctttaaggattttgattagaattacattgtctatagactaatttggaagaattgatactttatgatattgaaacttcctatccatgatcatgatcatgggctccctatccttttttttttttttttttttttttttttttttttttttttgagacaggttttgctctgtcactcaggttggagtgcagtggcacaatcatagctcactgcagccttgaattcctgggttcaagtgcttctcttgtctcagcctcccgagtagctaggactagaggcacacagcaccacacttggcttttttttttctgtagagaatacaaaatttaaaaatttaattttttgtagtgtctcactaaactgggattacagatgtgagccactccacctggcctcctcctccaatttttaagagagtcttttaatgtcttttgataacctttttaaattttcagcacaaagacactgtaagtcgtttgccatatttttaggtgggtataatacgtatgtttagttctactaggaataaataaatcttttctagttttttgtctttaacatcttatgtttttgatttcttattctactggctaacactcccaggatgatgtttagaagttgaacagaaaggtgatagtgagaacccttttcatattcctgattttgaaagaattgttgctggtgctgtggctcatgcctgtaatcccagcactttgggatgctgagatgggagaatctcttgagcccaggagtttgagagtttgaggggatctgcctgggcaacatagtgagactccatttcttttttttttttttttttttagacagagtctccctctgtctcccaggctggagtggtgcagtggtgcaatctcagctcactgcaagctccgcctcccgggttcatgccattcttcctgcctcagcctcccgagtagctgagactacaggtgcccagcaccatgcccggtattttttttgtattttgtatttttagtagagacggggggtttcaccatgttagccaggatggtcttgatctgacctcgtcatctgcccgccttggcctcccaaagtgctgggattacaggtgttagccaccatgcccggctaagaccccatttctttaaaaaaaaaaaaaaaaaaaaaaaaaagccaggcgtagtggcatgcatttgtagttctagctgcttgggaggctgaggcgggatcattgcaggagattaaggcacccacaaagatgcacttaaaccagttgtttctgctgagagcagctgggatttgtcactggatttgccaggtatagagactcgccagctgccatcaatgcttctggtcctttttggtcagctgctgcttcatactacgtaggaaagattgttaaagcccagtgcactgtttcctctggtcactcctctgctatcaaggtgttctcttttgcgttatagaaagcttaaagttcatctaagtccagaccagtactcctataggaatataatgcatgccacaaatgtgagccacttaaataattttaaattttctagaagctacattaaaaagtaaggagaaacagatgaaataattttttaaaccactacatccaaaatattattatttcaacatataatcaataaaaaatagtactgaggccagcacggtggctcacacctgtaatcccagcacaggccaaggcagggaggatcgcttgagcccaggagtttgagaccagcctggacaacatggtgaaaccccatctctacaaaaaataaaaaaaaaatgagtgggacatgttggcacatgcctgttagtcccagctactcaggaggctgaggtgggataatcactgagccaggaaagttgaggttgtagtgagctgtgattgtgccactgcactccagcgtgggtgatggagcaagaccctgtttccgaaaaaaaaaaagaaaaaaaagatatacttaaaatttattctaagatgaagtcttcaaaatcaggtgtatatatcatgcttacaacacattatataatttatggctcctgcctagcaggggtcatcactgttagttcaacttttctttggcaagtctactccctgtgccccaccgtacactgctacattattgtttgtatatgtgtgtgtgagactgcatttaggcaactgtaataggttgaatttggttatttaatctctgtccaaaatcacatcacaaagatgccttgattatagaaagatccttccttgcagcatattagttatttgacaccctcagtggatataagtgaatattttgagggaagaatagaaaagatacaatttttatttatttatttatttatttatttactgagacaagttgctgctctgtcgcccaggctggagtgcagtgacatgatcttggctcactacaacctctgcctcccggttcaagtgattcttctgcttcagtctccctgagtagctggggttacaggcatgcaccaccacacctggctaattttagtattaataatttatttttaaatggaataataatttcactttcttcttaccagatctttctgtctgggttgtttgcttttatgagtttttttgtttgaatctcccttttacattaaacaaaaattaacattttattatgggaaatttcactatgctattagaaaagcatagtgaacccccaggcatcatcagtgatattcggtgtatagcagttcacggacagttttgtttcatctataccaacacctattgcttatcctccttctgtgtcccccagttactttgaattaaatcttatacatatacagatgaatattatcacttcatctgtatcagaatgttatttttattaagaaaattatttttgagatagggccttgctgtagtgcccaggctggagtgtagtagcatgatataactccctgcagcctcgaactcctgggctcaagtgatcctcccacctcagcctcctaagtaactgggactacaggtgtgtgccaccacacctggtaacagatggttttaaaaactacaatacattatcacacttaaaaaaattatcttatctaaaataactattcagattttcccagttatttcataagtgatttttttttttttttttttgagacacagtttcactcttgttgcctccaggctggagtgcaatggcccgatcttggcacactccaacatctgcctcccgggttcaagcaattctcctgcctcagtctcctgagtagctgggattatagacacccaccaccacgcccagctaatttttgtatttttagtagagacaggatttcaccatgttggccaggctggtctcaaactcctgacctcaggtgatctacccgcctcagcctcccaaaatgctgggattacaggcatgagccactgtgcctggccttcataaatgatttttatggttcaaatcaggatccatataaagtccatatatgtgtctttttttagtctatagatttcccttccatctcctctgcaatttatttttggaagaaactgagttattgagtcatttgtcatctagaatgatgtacagtttagattttgctgactgcattccatggtgtggccaaacttcctctgtctggtgtatttctcataagtgtgtaattagatggaaaggcttggtcagatttaaattagtttttttttttctacagggatatttgagaggtagtggtatgtatttccatcaggaagcacataatgtcttcttggctctctttgtgatgttagtagccatcaatttcagtgcctagatacattaattagatttctgtatctcctactatctcaaaattttccatcttctgtctgtgctacattctgagtcctttcttcagttataaattctaattcattgtataattcttgttaatctgttgactttctaaaactggcttttcatatctaaaaaaatttccttttttcaagtctgttcattcctcatagttcttactaattggtcatttttacatcctttttttttttttttttttttgagacggagtcttgctctgtcatccaggctggagtgcagtggcatgatctctgctcactgcaacctccgcctcccaagttcaagtgattctcttgcctcagtctcccgagtagctgggattataggcatccaccatcatgcccagctaatttttgtatttttagtagagatggggtttcatcatgttggccaggctggtcttgaactcctgacctcaggtgatctgcccacctcagcctcccaaagtgctgggattacaggcgtgagccactgtgcccggcctatccttaactttagacattgcacacagtacaactgctatccgtatcggatagttcttaaggtcagcagctattgcttattgtgtctgctgactctcttggtagctgcccttcttttgtgtctagtgatctttgagttcattgtttgatcttaaccaggggaactgtatgggccaaaattaggattgaggatatttttctccatagaggattttccttaacttttgcagcagctgaaagatgccattcagatggatctacattagtcatgatgccagaattgggcaaatctgctgacaccaggacacctgtgtatatgtgtttgtgtctttccaggaattcattgaagagttgctgtctcccccttttgggggtttagtggcatttgtgaaggaggctgaggctttgattgagcgtggacaggctgagcgacttcgaggggaagaaggtatgaggaaaatatggtaatgatgggatcagtggtaagggaagtggaaaagaaaaatgaaaggatgcagattacatggtgggggaatagagtatgaaagactggattgagagaataccagaaaagagggtttgatgataaggatggctataccttggggagaacttagtggagttgaagatcagccagatccctctctgacactgtttcctcctgctattagcccgggtaactcagctgatccgtggctttggtagttcctggaaatcatcagtggaatctctgagtcaggatgtaatgcggagtttcaccaacttcagaaatggcaccagtatcattcaggtgacctgcaagtcccaggccccactcagatcccccatcattaattattttccccatctttttgctgggctcagcatcatctaagtgacccttggtcttcagttactagctgtgcccaaagttctgtatgagccctaacctgattcttttttttttgtttgttttgttttttttttgagacagagtctagctctgttgtccaggctggagtgcagtggcacagtctcggctcactgcaacctctgcctcccaggttcaagtgattttcctgcctcagcctcccaagtagctgggattacaggtgcctgccaccacaaccagctaattttcgtatttgtagtagagatggggtttcactgtgttggccaggctggtctcgaattcctgacctcgtgatctgcccgccatggcctcccacagtgctgggattacaagtgtgagccactgcgcctggccgcctaacctgattcttaatcatcactattagcaccattttacggtttgatccctcaatgactttctttgaccagggagcgctgacccagctgatccagctctatcatcgcttccaccgggtgctgtcccagccgcagctccgagccctccctgcccgggctgagctcatcaacattcaccaccttatggtggagctcaagaagcataagcccaacttctgatgtgccagaaaccgccctgagatctgccggtcatctccatggacttctgcaccccattccatacccttcttcacctggggtaccccttccagttttccccttgcttcccaggcccttgacatggcttacctgccttcactcccagcaccttgcccaacaggataagctggatccccttggccttctgaatatcccagtgtcttcaggtttcccaagaccacttccctgtgggcttccaaaatggcctttatcatttctccagtctgtcaccctcctttcctgctcccatacacccaaggcttgtttcttcccctgtaaaaaccactgcctcaatctctggttcactcaactagtcaccatgtcctgaggcatgaagcctcctcagctcttggaattgctggcaaggggtgactgcctctgagtcattgtgtttttcaaagtgatttcttttctgtagctttttgacctaagatctcagcaatttgaacactaacctctcccctcctggctcaagaattactccgaagtcagtctgcagaaaataaatatttagtatgacatgacacttatcccatttcctttctccttcctcctgaaggtttttcaggtggccccatctctagaatgacctttcctttctgactacttcctgggcttacatcccttctggtgggtgtaacctctaacctctagctactcccaggccattggaggaaggtggcccctggctaaaatagcagatgctgcaagggatgagaaccaggccgcgcagccccagacactgtcccaagggctcccttgggacaagcccaagctgactctggaatccctcctccgtagcagctccatagctcctctggttgtggctgtgacagccccttgctcgggggctgcagcacccaacccacacccacaccgttggggcagggctagaccaggcgaaattcgtaccatccgtttgtttgacttggagccttcctgctgtcctcgcctatacgcctcgtttgaacttaggctctagactggagagacacggggacccctttaaggcctaagaagagaggcgcagttaaggaaaaatgttacgtttcctgtgtcctccacccctacggcctaaacattccctccccaggtccctggagagtggtggaaagcggttcctccccgcttaggcccttcggatgcaggtctagcccgtcggcaacgggaggtgtcctgagtgggtctgtgactgccgagcacacccgccgcggagcggaggctgctgcttcctgaggctgagagtggatccggctccgggctctcctaattggcggacgctggggggcggcgtggtaaggcagaacggagcggcatctcagctctcgccttttcagggttccgccccatatccgagagccgctctctaattggcttgggaaaccgtatctcagcgctttggcctagcgactttgaacgtgtttgcgcctgagaccgaagtgcagaagagggcgagcgcaggaggagaggcttggtgaatcagcgattcctgattggccaggcgtgccttgagggcggggccagaactgcgtccttaactgacctcgcccttgcccagatcaccgcctccgcgttgctccgggtttaccccgcctgactcgctgcgctatgcgttccctcacgcctgccggatgccaggcggcgatgtgccaggctctgaggggccgcgagctcaccccagacgccggccccgggaatcctctgctcctccactttcccttcccgctactggtttcttgcccacccactcccaggtgtcactcttgggacatccagatgttctgacatttgacctgactccagcctcagcgcgaggacgggagaagggccaagggtatgagattttggacaggagaggcattggctactctgacaaagagcgtggattcccaaagaaagggtccccagataccccgcaggggagactgtcgagacaggcgactttagccaactaatgctcgcacgcgaggagggctgtgcaggcaggcaccacggttcttcacagccttccttctttccttcccctgtccgtcgcagaacccaaatcctcagagctgatcgagaagcgcgtgttgttgcagaagtcactgaggggcagacctggaatgtgagccgtggggcgaagggacagctctggagactcgtgattccggaacccggtgggcattcaagtgatactggagcacgcagttttcggggacattaagctcgccccaggggtccacaggaaccctctgacccaacggtctctctggacaggatgatccagaacagacggtgaagagacaaaacagcgtgaaagggagcggcgatacctaaactgacctccggagggcagcatgatcaagggaaggagctgttctcgctccgctcaaacccccgcgcagcctctgcagcttactcctgcttcggaaggcggcgaggttccacccccaccaccccggtccccgccgccctcttcgcgctgaagctgcggagggtctttttcttcagcccccaaatcctctgctctgtggcttaagattcccaggcttaaacccataactgctagggtcatcactcctcaaacttctccctcacttgttttgctgatgacggacacaggggcctcacagactcagaagcatctggagtcatttcgaaggacagaactgtggcaatatcctctttccccctcctaatctctgagaacagtgtctgtatatggcacgggggtccctagtgtcatatagaaggactcggagatgtcctcatgggctgtaacggcccccggtgctattcagggatctctgttctttaaagaaatatcatttccccttatttctctacctttgtgccctcacctcgccctgaattgtttcttaaactgggctttctgggaaacgtttacttcgtgttcaacagcaaagtctcggcataaggcgagggcggcagggggtggggggcgggcgtttgctcgccttggcattaatttcagagctgctgaacgtggacaaaagagagggaacatcctcctttcttccattcctgtaaatatggacccacccaccctccacttaagatgggtggcttttctgattttaagatatcaagcagcctggcgaggtggctgacacctgggatcccagaactttgggaagccgaggcgggaagatcccttaaggccaggagttctagaccagcctggccaatatggcgaaaacccatctctactaaaaatacaaaaattagcctggcgtggtggtgcctgcctataatcccagctactagggtggctgagtcaggagagtcgcttgaacctgggaggcggaggttgtaatgagccgagatggccactgcactccagcctgggtgacagtgagactctgtctcaaaaataataataataataataataaaaagatataaattggctgggctttaaaataaagtagtcagaggcccagggtggtgactcatgcctgtaatccttttggaaggcagaggccagaggatcttgagcacaggagtttgagactagcctgggcaacatagggagacccatctctaccaaaaaaaaaaaaaaaaaaaagcaaaaagccaagcatggtggcccatgcctgtggtcccagctagttgtgaggctgaggcaggaggattgcttgagaacaggagttagagattgcagtgagctatgattgcactactgcactccagcctgggtgacagagtgagaccctatctctttttaaaaaattaaaaaacaaagtagatttagtgtgaagattcaaggaaagaaagagaaagcaagacaaaactttaaggagaggagaatcgaaattggctgacttcaccctggacataatggacacagctattcatgttacgtactagcgttaacaaagtgttttcagaagcagttgtcattaaaccaacacatttattgaagctcttctctgtgttctgtgataggcactgcggattcagcagagactaaatcaaagtccttgatctcggagagcacatatttcatctaattgaattcacataccagccttatgaggaggtgttcttcctgtttcaggtaatgagcttgaatttcaaataatgagttcaaaaccatataggcactcagtggctgaaccttctgtgcccacattcagcttttgttctatgactccaggctgggagtcatggagctgaggaggcagccggttgtagagaagcaacagattaataagtaatagtaaattattgaaaaaatatttacagaactgaaggaaaagctgaacaggcggtctttggaaaggacagaagccaggatagttccagcatccaggcagcagacaccaatggtcagtgcttctactttggatcaaaaagagagaactccaataggcttagggtgggtcaggtgctcacactcatctgaggaaggggagggtcccttgaggaatagtaccatagactacccaatgttggaggataatggccccaacgcaaaaatgggatcttgccaccagacaaatgggatatagatgccaggctgcaaaatccaacaaatgtacacgtgcccaaatcccgactccatcactaatagccatgcaatcctctgactatcaattagattaattgacactcttttttctctcgctactgtggtacatgcagtagttacctttattcttcactttgttttctcataagactaacaagcagttttttaaaataaagaaataaaagcaaaattgcttattgtcttagtctattcattggcaaactagtaacattaaataaactccagacagagccactggagaagaatcaagtacaacttagtagaaataacaccgtatgtgtgaaggtgagtgtgtgtgtgtgtgtgtgtgtgtgtgtgtgtgtgtgtgtgatggaaaatactttgtcctgcccaaactgtaagtcatgaccatgcccctctcagcagaagtttatcttcatctcatttggaagtttataagaacacagcttaaaaaaaacctgtgattttggagcaaggtcaagcctttgctattgcttccacattttgttttgttttatttatttatttacttttcagttttttggagttttctttatttgtttgtgtttttgagacagggtctcgctctgttgcccaggctggagtgcagaggcaccatctcggctcactgcaacctctgcctcccgggttcaagcgattcccctggcttagcctactgagtagctgggattactggcacgcaccaccacatccagctaatttttgtattttcagtagacactgaaatacatgtttgccatgttggctgggctggtctcaaactcctggcctcatgtgatctgcctgcctcggcctcccaaagtgctgggattacaggcatgagccaccacgcctgcctagtttttagttttttgagacagagtcttgctcagttacccaggctggaatgcagtggcatgatcacagtttactgcagcctcgacctcatggatttaagcaatcctcccacctcagcctctgggatagctgggactacagtcatgtgccaccacacctggctaatttttgtattttttggtaaacgaggtttcaccatgttgcccaggctggtcttgaactcctgagctcaagtgatctcctacctcggcctcccaaagtgttggaattacaggcatgagccactgccccagctgttttattaatttagttaaaaatatatgaaaagaggccctgcgcggtggctcacgcctgtaatcccagcactttgggaggctgaggtgggcggatcacctgcggttttggagttcaagaccagcctgaccaacatggagaaaccccatctctactaaaaatataaaaaatcagctaggcatggtggcacatacctgtaatctcagctactcgagaggctgaggcaggagaattgccctaacccagaggaggttgtggtgagccaagattgcgccattgcactccagcctgggcaacaagagcgaaactctgtctcaaaaaaaaaagtatatatatatatatatatatatgaaaaggctgggtgcggtggctcacgcctgtaatcctaacactttgggaggctgaggcaggtggatcacctgaggtcaggaatttgagaccagcctggccaacatggcaaaaccgtgtctctactaaaaataaaaaaattagccaggcatggtggcaggcgcctgtaatcccaactacttgggaggctgaggcaggtggatcacctgaggtcaggaatttgagaccagcctggccaacatggcaaaaccctgtccctactaaaaatacaaaaattagccaggcatggtggcaggtgcctgtaatcccaactacttgggaggctgaggcaggagaattgcttgaactcagggggcagaagttggcagtgagccaagatcacaccatttcactccagtctgggcaaaagagcaagattctgtctcaaaaaaaaaaaaaaaaaaaaaaaaaaaaatatatatatatatatatatatatatatatatatatatatatatatatatatacatacatacacacacacatacacacatacaggcactagccaggcgtggtggctcatgcctgtaatcccagcactttgggaggccgaggcgggcagatcacaaaacaggcagggcatggtggtccacgcctgtaatcctagcactttgggaggctgaggtgggcagatcacttgagcacaggagttcgagactagcctgagcaacatggcgaaactctgtctctaccaaaaatacaaaaattagctgggtgtggtggtgcatgccagtaatcccagctactccggaggctgagaggcaggaggattgcttggggaggcagaggttgcagtgagccgagatggcaccactagactccagcccaggtgacagagggagaccctgtctcaaaaaaaaaaaaaaaaaagaaagaaaagaagaaaagaaaaacaaatcacctgccttatgaagaaacagtttgtaatagatataagacacagaatgtgcagcccctggtatggaataagtccttagaaaatgttagtttcctctctgtccctgtgtgacatgaagggaattccagggccagtgccacttcctggtggtttccctcacttaagtgctgtgtaccccattgcaaaagcatgtcttccaggttcctgataccacatcccatgtcctctgcctttggggctctcataggattaagtgtcattttccctatgaactagaaaagaatcttctgaacgtctgccttgggactgatgatatagctgagctgaaaggacaattagttttcctccccagaccaacccaaccttcaaggctggggactcatttgatgctcccattcaaacatttggagaaaattgtctctgagtaccaggtctttttagcatattttctccaaatgttacatccttaggggctttgaatagtagaagagccttcaacattggttcagatggaagcatgcaggcatgtggagagttgccactccctgatccctgaaacaaggcttaggatggaaaagagcctcctggggaggttggctctgaatgtaaagctgggagaggcacctcctgtcaacctaagggcttgttggtaggggcaacatgttgacctggcttccttcccactctgagacatcactggctctcatgcagagctattttccttctttctttctttctttctttctttcttctttctttctttctttctttctttctttctttctttctttctttctttctttctttcttttcttttcttttctttctttctttttttttttgagacggagtttcactcttgttgcccaggctagagtgcaacggcacgatctcagctcaccacaactgccacctccctgggccaagcaattctcgtgcctcagcctcccgagtagctgggattacaggcatgtgccaccatgcccagctaattttgtatttttagtagagatggggtttctccttgttggtcaggctcgtctcaaactcccaacctcaggtgatccacctgccttggcctcccaaagtgctgggattacaggagtaagctgccgtgcctggcctttcattcttttctttccttctttccttctttccttccttccttctttccttctttccttccttccttcctccctccttccctccctccctcctttcttctttcttctctttctttctccttccttccttctctctctcttttcttttctttcttctttctgggtttcgctctattgccgaggctggagtgcagtgagtggcacgatcacggctcactgtagcctcaacttcctaggctccagcgatcctcctacctcagcctccttagtagctgggattgcaggcatgagccactgtgcccagtgtaatgcagggctcttcatccaggatcccaaagggcaaacaaaaataggagaaaattacatttcattttcactaatctctaactgaaatttagcattttctccaatgataaatgtaggcaataaacctacaccggtatttgtagtacatgtgactgttgttaatagaatttacacatttgtgtcatcttccagtagttgcagaaatttcaaaatgtcatgtatgctcacggttactttgtagttagtggtagtggttagactcaccactagatcttcttcttacacattttgtttcattttgacaactgtacttcaatatgattgttttcctttgtaatcccatttattttactttatgcagttgaagattattctgacactccacagacttcaccagacttccaaaacctgtcctagacgtaaaaagttaagaaaccttaaatctctaatgatgctgtcatttcctgttttgtattatcttacaaccagggtaattaggaatgccttcttcttcttctttttttttttttttttttgagacggagtcttgccctgtcacccaggctggagtgcagtggcacaatcttggctcactgcaacctctgcctcccgggttcaagtgattctcctgcctcagcctcccaagtaggtgggattgcaggcatccaccaccatgcccagctatttttttgtatatttagtagagatggggtttcaccatgttggccaggctggtcttgaactcctgacatcaggtgatccacccacctcagcctcccaaagtgctgggattacaggcatgagccaccgtgcctggcttgctttcttcttgtttaaactaaaggtcttcttgtaaaattcctgcttatattttcttcattattactcaaattcaattattcatttatttgccaaatatttagaaaacacttctcttgtacaaaaccatgctgcataaaactgttattatgcgaaaaataatccttactcgccatgccctctaccccgaccccccaaccccatttacaatctggtagagctggactgtttacccacataggacacacaggctgcagcttaccatgggcagggagtggggatggttgttccaggtgcaggtaataagaaggtgtattgtctgtggagaatttaaaaataattctaaaaccaactttttttttttttttttttttgagatggagtctgactctttggcccaggctggagtgcagtggcaccatcttggctcactgcagcctctgcctcccgggttccagtgattctcctgcctcagcctcccaggtagctggcattacaggcacacaccaccacgccaggctaatttttgtgtttttagtagagacggggttttaccacgttggccaggctggtcttgaactcctgacctcaggtgatctgcccacctcaccctcccaaagtgctaggattacaggtgtgagccactgcgcccagcctgaagccaactttttattgatactgcgcaccagcaattataaaaaaatgttagtgacaaaataccccttgcagtgtagcctcctccccccactccaccctgcttggtatgccactgcacacaggggagtttaaccatttccagtttacacacacacacacagacacacacacacacacacacacacacacacacacaaacacacagagcctttgagacttccttttctcctcaactcccccagcccagttctcatgtcactctactcagggtaggatctgcagcactgctgggccagtatccccaaaggtgagccctgtaagctccttggcctctggatggtctcattaatagtccaggatgagccctgcaatcttggcatctgtaggcaggtctcagctcttcttcacacccctgggcttgaaccccttggcaactgcgtttgacagtacatgattcccattcttcatctccagattttccatccttcaagaaaacactggatttcctggtcaagccaaggcttaatgaactggcctggcagcttctctggtcctcaagtttccttttcttgccttactttctgaagacttctagtagttttacttggaagtgtcactgtctccatttttattcctgagttttctgcagttcttttttctgtggccccacggactcatccagagcctgcagggagctgacacctcatctgagctgctagaattgaggtgagaaaggaggttcctaagtgcagaaatgtgttttctcctctccagccaccactgaaggctttggatgtgattgagtcagacctctcctgcacagtctccctttggattacctcaagataaaccaatttgtgactttaattacatccgcgaagtcccttcccagctgcacctaagctaaagtgtgattgaatgaatgaaagagggtgtgctggcgatcagctagggaagtgattccaagggtccctagactccacattaccaactgcaaaatgtgacgttcttacgttctgacaagcgaactctcctcccaaattcattgcctgagttgatgcaaatgaattcagccacgccttttgggtttggcatctgagaagtgtctgtgacttgggaagagtggtcagaatggcgataatgggaagagaccacatttcagctggtggagagtgaaaggacagccaacatcttgccctttctgaagcatacacacattggagattgaaagtgtctgttggcctcacaggcactgaggaaagcctcccatccccttagattttcctcctttttcctgaggtcccctgaacctaatagtctgtaaccttattccatgtctgggtcaacaaaccaccttccaaggaggacttgaatataataatccgtttcctctgcattcctccagaacacagagtccacaccatccatgagtctgtcaaacaaaacattcctcattggtctcaatgttgagcactgaaagttctctgagctcatttagcaccaactcatcatccttaaaatccacaggatgggccgggtgcagtgacccatgcctgtgactacaacaccttgggaggccaaggggcagatctcttgagcccaggagttcaagaccagcctgggaaacatggtgagacaccttctctacaaaaaaaaatttttttttttgagacggaatctcactctgtcgcccaggctggagtgcagtggtgcaatctcggctcgctgcaacctccgcctccagggttcaagcgactctctgcctcagctcccgagtagctgggattgcaggcatccaccaccatgcccagctaatttttgtatttttagtagagacagggttttaccacgttggccaggctggtctcgaactcctgacctcgtgatctacccgcctcagcctcccaaagtgctgggattacaggtgtgagccaccatgcccggcctacaaaaatttttttaaaaaaattagccaggaatggtggtgtacacctgtggtcccagctacttgggaagctgagataggaggattccttgagcccaggaggttgaggctgcacagtgagctgtgatcacgccactgtactccagcctgagcaatagtgagaccttatctcagaaaacaaacaaaacaaccaaaaatatccataggatgaaacatatgtttgattatgacaacttgcttatggtaccttctggatggcccagctcccttgcagatccccagaccaacagcttttgttgtagtgacagcttcttcttgtaacctctttttttttttttttgagatggaatttcactcttgttgcccaggctggagtgcaatgacatgatctcggctcactgcagcctctgcctccagggttcaagcgattctgctgcctcagcctcctgagtagctggaactacaggtatgcaccaccatgcccggctaatgtttgtatttttaatagggacggtgttttgccatgttggccaggctggtctcgaactcctggcctcaggtgatccacctgcctcagcttcccaaagtgcttggattacaggcgtgagccactgcacctggcctacagcctctaatttcattttcatccaaaagctttaatggaaggcccacagattccctcttcaagtaacagcaaagcgcatctcctttaagatttctttgatcatcttcataaagcttgactttgaagtcttctgaggatttctcctggaggcaaaccagatatatagacatttgtatttctgtcttcttcaacatgaaattatcctcattccatttttcttttatctcccctgtttttaggatcagtgggtttggggggttttctttgcagaaattctgcattcctagcattgacattttgtacatttgcaggagagctagatgccccaccattagaaaagccacacttggctgggtatgtagcaatgaaaccttcagtggccttgggaaaccacgccttcttgtccagatcccactcattgtgggagtcagttggctgctgccctaaataacccgtttgtcactgagatcttcttgtctgttgcagtccttagtgtctccatataatttatgcattcacaactgctcatcaagtcatcattatcatccacttcatgtttcctacctagccaggggcagggttcaggtaatcaaagaggctgctctgctgggcctgcaaggctccaccaagtgtgtctgaggtgacagcccaagcactgttataaatatttgcgcactgttgtaaacatttgcattagtcccttctcgcactgctataaagaaatacctgaaactgggtaacttataaagaaaagaggttgccgggcgcggtggctcatgcctgtagtcccagcactttgggtggctgaggcaggtggatcacttgaggtcaggagtttgagaccagcctggccaatatggtgaaaccccgtttctactaagaatacaaaaattagccgggcatggtggccagcacctgtaatcccagctacttgggaggctgaagcaggagaatcacttgatccggggaggcagaggttgcagtgagccaagatcatgccactgcactccagcctgggtgacagagcaagactccgtctcggaaaaaaagaaaagaaaagatgtttgctgggcacagtggctcatgcttgtaatcctagcagcactttgggaggctgaggccggagggttaatcacttgagctcaagagtttgagaccagcctgggcaacatggcaaaaacccgtctctataaaaaattcaaaacttagctgggtatggtggcatgtgcttgtggttctagctacttggggagctgaggtgggagaattgcttcagaccagaaggtagaggctacagtgagctgtgattgcgccactgcctgggcgacagagcaagaccctatctcaaaaaaaaaaagaggtttaattggctcatggttctgtgggctctacaggaagcatgatgctggcatctgcttgccttctggggaggtctccagaaacttacaattatggcagaaggcaaaggaggagcgagccttctcacatggcaggagccgagagagagggaggaggtgcggcacacttttaaacaaccagagcttgccagaactctctatcatgagaacagcaccaggaggatggtgctaaaccattcgtgagaatccactcccataatccaaccacctctcaccaggctccacctccaacactgggactacatgagatttggtggggacacagatccaaaccatatcaacatttaacacattgcatctttgaattgtcacagcaaccctgtgaggtgggtactagtgttatccccattttacagagaggaaattgatgcccagagaccttgccaaggttatagacaggacagttagtgcatgacaaagctggaattggaatgcagccagttctgctttagaagccactttcttgcctgcctttctttctttatttctttatcttttctttctttctctctctctccttccttccttccttccttttctttcttttcttttcttttttttttttttttttgagacagggtctggctttgttgctcaggctggagtgtggtggcaccatcttggctcactgcaacctccaccttctgggctcaagtcatcctcctacctaagcttcccaagtagctgggattacaggtgcataccaccacacctggctaatgtttgtattttttttagtagagatggggtttcaccatgtttgctaggctggtcttgtactcctggcctcccaaagtgctgggattagaggcgtgagctattgcaccccgcctgaagctacattctttttttttttttttttttaatgagacgagtcttgctctgtcccccaggctggagtggtgcagtggcgtgatcttggctcactggaacctccgcctcccgggttcaagcaattctcctgcctcagcctctcgagtagctgggattacaggcacctgccaccactcctggctgttttttccatttttaatagagacggggcttcaccatattggccatgctggtctcaaactcctgacctcaagcgatccgcctgccttggccttccaaagtgctgggatacaggcataagccatcgtgcctggccaaggctacattcttaaacgccactttttacagcttccaagaaactaactgggtgaaatccagcctgcctcctgtccttgtttttatcatttcatagtgaaaacataaactcccaagcccacctactctattgcactgtgtctccatgacactctgtaccttctggctctgactcagccctccactttccccctccctaacctgcctgtgccctctaataaactgtagcccccctcatacccttagcttctccttggagcattccctccacttcctggcgttaagtgaaatttaactctcccttgagggcactacctcctttgcaggcttctgaaatgagagctgttgattttcttacagctgagggtgctctcctggcttcagattgctgcctccggactactcctcccccagcccccaactctagtttaaaataacccgcggccttccaggcactgcaattaggctaaactttcctcttcctttctcactgctactgtctgccagacccctccacctcactcaggggaacgctggcccagctgaccgtctgtctttgcattgagtcctccctctgggagacttcattgtccacctggaggatccattccctacttgacctctcaataacctggccacttaatccccaagaatcttctcctctccaactcggccacacattctcattgtcataccctggaccttatcacctgaaagagcccctccttgagaatcagtcaagcagcctgctcttggcccccacctcctaaccgtctgtccatcagtctgtctgccctcctcgcaaccaattttcagtctcctaggacctttggatcaatgatgccttccgtcttccagcttatgagcccctccctattcagctcaactccacaacccttcatttcaacacctctctggacaatgtcgccaactccccttcccctctgtattttcatcctttgtacccaagtggcaaaaccccaaccctggatgagcccagtgatctgttttcttcaggattttactctgatagccaagaactgttggtggtggtgggggaaatcacacaatcaggaaatggttcccactcctcactcatgatcatgaactctaaggaggctcccagaattgtttagtggcccaaccacatcactctggtcaatggctacgttaaacctccctgatccttgaacctctgaggctcttctgtctctcacctcatgctcacttgatgacctccctcttatgtcacagagaaaatgaaagtcatcagaggtgagctccctcaaccatctgtcaccagatccacacccctccaagaggaacacaatgcatgcagcgcatgtaccttgatttgatcctgatttgaaatatatgcataggctggatgcagtggctcacgcctgtaattccagcactttgcttgagctcaggagttcaaggcaggtggattacttaagctcaggagttcaagacccacctgggcaacagagaaaaaccctgtctctacaaaaaaaaaaaaatacaaaaattagtcaggtgtggtgggtcacacctaaatagtagttccagctacttaggaggctgaggtgggaggatcacttgagcctgggaggtggaggttgtagtgagctgtgattgcactgctgcactctagcctgggtgacagtgagacccagtcaaaaaagaaagaaggaaaggaaggaaggaaagggaggagagagagaaaggaaggaaggaaggaaggaaaaacagaagaaaggaaggaaagaaattaaaaagaaagatatatatatatataaatatatatataaaagacattttgaggctaactggggaatatttgagtatattctgctatcagatgaagtgaagaaatgatcgttattttctaattttgtttttttttttgagactgagtcttgctctgtcaccaggctggaggtcagtggcgcaatctcagctcactgcaacctgtccctactgggttcaagcaattctcctgcctcagcctcccaagtagctgggattataggtatgcaccaccacgcccggctaatttttgtatttttagtagagacggggtttcaccatattggccaggatggtctcaatctgttgaccttgtgatcctcctgcctcagcctcccaaaatgctgggattacaggtgtgagccaccgtgcctggccatgatcattattttcttagctgtgattacgtattgtggttatggaatctccttatttttgggagatgcatgctgaggtacttaggtgtgaagcacatgctttcctatattttcatatggtccaagaatgttttagtagtcactcaacaatttctatgtttaaaaaaaaaaaaaagggctgggcacagtggctcatgcccgtaatcaatccgagcactttgggaggctgaggcaggcggatcacctgaggtcggaagttcaagaccagcctgaccaacatggagaaaccccatctatagtaaaaatacaaaattagcttggcgtggtggcgcatgcctgtaatcacagctactcgggagtctgaggcaggagaattgcttgaacccagtaggcggaggttgcgtacagccgagatcgcgccattgcactccagcttgggcaacaagagcgaaattccatctcaaaacaaaaaactaaaaacaagcccacaaagacgtatataggccttggcactgtggctcatgtctgtaatcccagaactttgggaggccaaagcaagaggatcacctgagtccagtttgagaccagctgggcaacaaggcgataccttgtctctacaaaaaatttaaaaattagccgggcatggtgccatgcacctgtggccccagttacttgagaggctgaggtgggaggatcgcttgagcccaaaagtttgaagctgagatgagctatgatcaggtcactgcactccaccctgtgcgatgaagtgagaccctgtcttggaaaaaaaaaaaaagaaccatatatatatgtgtgtgtatatatatatgtttgtatatatataatatataaatatttgtatatatgtataaataacaattgttaaatctaagtaaaatgatcgacatacaaacaatattgtattatattttcaagttttctgtatgtttgaaatttttcataataaaaaaactgggcaaaattctctcacttccactcactgctcgaccctttcaggctggtgtttatctctaccttgctgctactcaaatgtttttttgcaatgaactttatgtcattaagtccattgtttcgttttcttcttacttgaactgccactagtagctgacgttgctggccagttctttcttgaaacactgtcgttttttggcctccaggatttggcctcttctggcttcctcccatccctccatcggctgctcttccacccctcagccggctcactccgcctttgactgaaatcacctggtcatattggagttcatcaagagaggtcggtcctggaccctcctcttcttatgctaccctttccttctaggggatcacacctgtcctgtggcttcagttcccatcagctggttactctcaaatttatctcttgcctcaaatctccagatttgaccaccttcctgcctggcatccctacttggatgtcccaaaggtattactaacttagcttttttttttttttttttgggagacagagtttcgctcttgttggccaggctggggtgcagtggcaagaccttggctcactgcaacctccgcctcctgggttcaagtgattctcctacctcagcctccggagtagctgggattacaggcatccgccacgacacccggcaaactttttgtattttcagtagagatggggtttcaccatgttggccaggctggtctcaaactcctgacctcaggtgatccacctgcctcagcttcccaaagtgctgggattacaggcatgagccacggtgcccagcttaacttagcatatttgaaacagaagtcatgatcttcccacagaagcagtatcatcctcagatctgaaccacaggggccctgccctggcccacatactttagggggattcacctatcacaaacaacttatcacacacatttattacatgacacctgggcacctctgtcactgatctgctgtcagtgctggaacagcacaacctgaaatcttacacatctgctcttgtaatcaacgccgttcaagccctggggaatggtgacttctgtaatctcttgccctgtatcctggaaacaaaagatgactatagccaattctgtgaaaatctgaggttgtgcctctgcctggattctgaagcatgtactgctttggagtgtagggaggatttaagcagtggaaacatgtaagtgaaatcactttaaccagcttgttaaatattacctctcaaatagcatgacaaagtatcatttcccaatagtgttgagtgtggtttttcttgtttctctttgttttagaggtatggatgtatgttgtgctgcatttacaacagttgcaaaggatagctgaggaacatgttgctgtattaaacaatccttattactgttaaatttatatgcatgtggtgggaggggtggtgagggataaaaaactacacatttacagtgtacactcctcctgtgatgggggcaccaaaatctcagaaatcaccactaaataacttattcatgtaactgaacaccacctgttccccaaaagcctattgaaaaaaaaattgaatacatgtaggtctagatataactcttgtgaagtatgatattgattctttatgttgtaatagatggacattgaatacgagattatgaatacaatcatcctcagtattcaccagggattgattccaaaacccccactgatgttcaaaccccttgtataacatggcatagtatttgcatataacctatgcacattcttccacatactttaaatcatccctaggttatctatggtgcctatcgcaatgtaaatgctgtataaatatatgttatactgtattttttatttgtattattttttctttctttccttccttccttcccttcccttccttccttccttccttccttccttccttcctttctttctttctgacagtcttgctgtgtcacccaggctggagtgctatggcaggatatcagctcactgcaaactctgcctcccaggttcacgccattctcctacctcagccttccaagtagctgggattacaggtgcccgccaccatgcccggctaatttttttgcatttttagtagagatggggtttcaccgcgttagccaggatggtcttgatctcctgactttgtgatccacccgccttgacctcccaaagtgctgggattacaggcgtgagccaccgcgcccggactggccatatatattttaaaaatatttttattcttcagttggttgaatccataggtgtggacctacagatacaaaatgccaactgtagtttaatttttataaaactatctgtcttagtccattcagactgctataacaaaataccttacactgagcaatttataaataataaacactgcttacagttctggaggctagaatgtccaagcaggtggtgccagcagatttggtagccagtgagggcacactttgcttcatagatggcgccttcttgctgcatcttcacgggtggaaggggcaaacaagctcctttgggcctcttttttttaagacagggtctcgctgtgtcacctaggctagagtgcagtggcgtgatctcggtttactgcaagctctgcctccagggttcaagtgattctcttgcctcagcctcctgaatagctgggattacaaatgcctgccaccatgactggctaatttttgtgtttttagtagagatggggtttctccatgttgaccaggcttgtcttgaactaccgacctcaaatgattagcccgcctgagcctcccaaagtgctaggattacaggcatgagccaccgcacccagcctgggcttcttttataacggcattaatcccattcatgaggacaggcccctcatgacctaatcaccttctaaaggccccatctcttaatatcaccacattggggattaggtttcaatttatgaattttaggggggcacaaacatttatgccatagcaatacataataaaaattaataaatatgtatatatttttttgagacagggtctcactctgtcaccaggctggagtgcagtggcacaatcatggctcactacagcctcaacctcccaggctcaggcaatccttctacctcagcctccagagtagctgaggccacatatgtgtgccaccatgcccggctaagttttctattttttgtagagatggcatttcaccatgttgcccaggggggtctcaaaacactgggctcaagcagtctgcccaccttgacctcccaaaacactgggatttcaggtgtgagctactgggcccagcccaaaatttcaaaaaaaagcaggcaaaaagtcagctttatctaaatgtgtttgatttaaaatattgatgtgtattcattatcatttatattttgtccagatgccgtgtctcatggctgagattccagcactttgggaggctgaggtgggaggatcactcgagctcagaaatttgagaccagcctggacaacatagtgagaccatctctctacaaaaactaaaaaaattagctgggtgcgatggctcatgcctgtaatcccagcactttgggaggccaaggcgggtggatcacttgaggtcaggagttcgagaccagcctggccaacatggttaaaccccacgtctactaaaaatacaaaaaattagcagaagaatgcttgaacccatatgtatacatgtatatatacatatgtgtatgtgtatgtttatatatatatgtatatgatacaaaattagccaggtgtggcagcacacacctgtagtcccagctatttgggaggctgagatgggaggatcacttggacctgggaggtcaaagctgcagtgaactgggatcatggcactgtactccagcctgggtgacaacgtgagatcctgccaaaaaaaaaaaggaaaaataaaaagagtgattttacagaaaaattgagattttcaatttatcacggcagtgccagctctgaattcctatgcggcaacgctggaccaggagctgctgcccctctaggaggggagggtgccctccagcctgttatagccttcccttggcacttggcacattacttgcctggcccttacaggaatttgaggtgcaaattgatctagatcattgaaggaagagtctgggtcttctcagttttggggcactttcgttgccaagtaaggttcttatgagatttttagaagttgagattaaaaaagagtttatatgcagctggaggtgatacctaacaacaaccataataacagcatcaacaacaaaaacagtagcctagagcagttactctaagccaggtaagtgttctaaagcacttcacacaacttatttactctcacgacaatgctattaggtagcactttgaatacacacattttgtaggtgaggaaattggggcatgtagctgttaagatttatatcagccgggcgtggtcactcatgcctgttcccagcactttgggaggccaaagcgggcggatcacgaggtcaggagtttgagaccagcctgaccaacatggtgaaaccccgtctctactaaaaatacaaaaattagctggacatggtggcggctgcctgtgatcccagctattcaggaggctgaggcaggagaatcgctttaatctgggaggcggaggttgcagtgagctgagatcatgccactgcgctccagcctgagtgacagtgagactctgtctcaaaaaaaaaaaaaaaaaaaagatttataccaatttataccgtccaataggaggcgtgagactcaacacagggtggaggagagaataggtcaggaaatcacatctctccacctgcacagccaccatcattgtacccttctaaagagactggcaacaactttcattcagcactgtcccattgattggctcatttcatgatcacagcaacccagttaagcaaatcctcacctttgcatcgcctgctttgtatcacttttctttaaaattaaaaataaaaaaaatggattacaaattcggttaacgcccatcccatttctctccttccttgtagtaattatcattctaaagttgttgggaattattcccatgcgtactttgcacttttaaaaaatgtttgctttcctaaacatataccactgttttgtgtattttaaaactcacacaaataatatcatacaacatccatttttgcaagtttcttactcattacattgctaaatatgtctataattcatttaactgctgtatagtatcccattataagaacaaaccatactttatttatccattttacttaacaacagttagcttatttccacttcttcttgacaattaactgatactgcaatgaccatttttatcctcgcctttttgtgcatgtgtagaaatgtttttctaaggaatagatctagaagcaagattgctgggtcatagggaatattcattttcagcattaactggtgccaaaattctcttcaaatttgttgtatctgtttacacttcaacacaaaatatatgcattcctattgtcccacatttttgtcaacagtgttagaataattttaattttggtgattttgtgggtgtaaaatggtaactcgcgctgtgatttgcatttctacattactggttaaattgagcatcttttcttatgtttattgaccattaggtttctcttttgtgactcacctattcacagcttttgctcatattctcttgcgttgtccttttcatatggatctgcaacttctttatgaatcctggatataatcctttgttgtttatgtagattgtgaatattctctaagtctgtggcttgtcttttactttacgtgatttcttttttttttttttttgagacggaatcctgctctgtcgcccaggctggagtgcagtggcacaatctcggctcgctgcaagctccgcctcatgggttcacgccattctcctacctaagcctcccgagtagctgggactacaggcacccactaccacgtccagctaatttttttgtatttttggtagagacggggtttcaccatgttggccaggatggtctcaatctcctgaccttgtgatccacccgccttggcctcccaaagtgctgggattacaggcttgagccatcgcgcccggcctatgtgatttcttataaaagcttaaaaatgttttaacgtggtcatatgtatcaatattttcctttattgcttgtgcatttatttatagtcgacaaataaaaattgtatctatggtgtaacaacatgatgtgtgtatatatatgtgtgtgtgtgtgtgtgtaatggctagagtaattactgtatctgttatctcacatactatcattttaaacgtgatatttgaaatgtactctcctagcaattatttttatttttattttttttttgagacaggatcttgctctgtcgcccaggctagagtgcagtggcaagattatagctcactgcagcctggacctcccaggctcaagtgattttctcttctcagcctcccaagtagctgggactactggcacgtgccaccacatcctgctaattttttcaattttttgtagagacagggtctcactatgttacctaggctagtcttgaattcttggggtcaagcaatcaagcaatcggcatcccgaaatgctaggattacaggcatgagccactgcgcccagctaatttttctattttttttagagatggggtctcaccatgttgcccaagctggtgtcgaactggtctcaagcgatccacccacctcagcctcccaaagtgctgggtttacagacataagccactgcagctggccagcaattttcaagtatacaatacattgttattaactctagtcatcatgttatacaatagatctcctgaatttattctacctaactgaaattttgtatcctttgactaaagctctccaatccctgcccacacccgccccccgccccctagcccctgtgcagccaccattctattctctgcttctgcaattttattttatttatttatttttttaaatttattttgagacagggtctcactctgttgtctgggttggagtccagaggtctgatcacagctcactgcagcctcaaactcttggattcaagagatcctcctgcctcagcctcccgagtagttgggactacaggcacgtgccaccatgcctggctgagtttgactctttaggttccacatgtaaatgaaatcatggtatttgtctttctgtgcctggtttatttcatttagcataatatcctctagttttatccatgttgtcacagatgacagaatttccttctttttaaagactgaatagtattccattgtgtatatgttccataatctctctatttattcattgatggacacttaggttgtttccatgtcttggctattgtgaataatggtgcagtgaacttgggaatacagatatctcttcaacatactgagttcatttctttcgaaatatacctgataatggaactactggatcacatggtagttttaattttttgaggaagctccattctgttttccaaaataggtgtacaaatttacattcctaccaacagtttgtgagggttcctttttctccacatccttgccaccacttgtaatctcttggtttatttttattttttttatcagagccatcttagcaggtatgaggtgatatctcactgtggtttaaatgttcatttccttgataattagcaatattgagcatttgtttttcatatacctgttggccatttatgtgtcttcttttgagaaatgttttttcagatcatttgcccattgtaaaatcagatttttggctggatgcagtggcttatgtttgtaattccagcactttgggaggccaaggcaggaggatcacttgagcctaggagttcaagataaatctgggcaacatagggaaaccctgtctctacaaaaaaattttaaaaattagcagggcacggtggggtgtgcctgtggtcccagctacttgggaagctgaggtgggaggattgcttgagcctgggagttgaaggctgcagtgagttattattgcggcactgtattccagcctgagcaacagggtgagaccccaacttaaagaaaaaaaatcagatttttggttttcaacaactcttgctattaagtttcttataaaaatattcaccccttatcagatgtatagtttacaaatattttgtccctttccgtaggttgtctgttgattgtttcctttgctgttcagaagctttcatttgatgcaatctcatttgtccaaaaaaattattgcccagaccaatgtcaagaagccaagatcatgccactgcactccagcccagcaacagagcgagactccatctcaaaaaaaagatctgaaattgtaaaaatactagaagaaaatataggagaaaagcaattctcctgcctcagcctcctgagtggctgggactacaggtgtgcaccaccacacccagctgatttttgtatttttagtagagatggggcttcaccatgttggccaggatggtctcaatctcttgatcttatgatccacctgccttggcctcccaaagtgctgggattataggtgtaagccaccgcaccccgccatttcagatcttatgtttaagtctttaattcattttgagtagtttttttttttttttttttttttggaggcagtctctctctgttcttcaggctggagtgcagtggtgtggtcttggcaacctctgcctcccagattcaagtaattcttgtgccttagcctcctgagtagctgggactataggtgtgtgccaccacccctggctaatttttgtgtttttggtaggtttcaccatgttggccaggctggtttcgaactcctggcctcaagtaacccattggccttagcctcccaaagtgctgggattacagatgtgagccactatgcctggcctgagttgatttttgtatatgaggtgagatatggtcaaattttattcttctacatgtggatatccagtttccccaggactgtttattgaggagactgtcctttccccattgtatgttcttggcatatttgtaaaggatcagttggccataaaatgtgtggatttatttttggcctctattctggtcttatatgtctgtttttgttccagaaccatgctgtttttattactatagctttgtggcagcttctgaaattaggtagtgtgatggctctagctttgttccttttgttcaagattgctttggccattttggtccttgtcttttgtggttccatatgaatcttaggattttttttctatttctgtgaaaatgtcattggaattttgatagaggttggatggaatctacagtttggggtagtgtggacattttaacaatattaatctttccaatccattaacatggaatatctttccatttatttgtgtctttaatttctttcttcaatgctttatggttttcagtgtacagatttctcacctctttgattaaatttattcctaagtatatatttttgatgctattataaatgtgattgctttcttgatttcttttttggttggtgcattattagtatacagtaatgctactgacttttgaatattgattttgtatcctgcaactttactgaatttattagttctaatagtttttttggtggtatctttagggatttctctatataagatcatgtcatctacaaagtgacaatttaacttctttctttccaatttggatgcctagggagcatcagtggctcaagccagctgtcctggtgcacagggaggcgaggctatgagttcgaggccaacctggtcaacattgaccaatttggatgtcttgtatttctttctcttgcctatctgttctgactagaacttctagtactatattgaatagaaatggtgagaatggttatccttgtcttgttcctgatcttagaggaaaatcttttaacttttcatgattatgtatgatgttagctgtgggtttgtcatatatgggctttattgtgttgagatacactttttctatacctaatttgctaagaatttgtatcatgaaaggatgttaaattttgtcaaacgcctttcccccatctattgatataatcatatagtgttcttcattttgttaactgcttgtacttttgtacttttaaaattttgtataagaaatccttctctattctgatatcatcaatatgtgatcttatattttctttgaatagttttcagttttgctttttactctagctacctgaaatttacttctgggtaggatgtaatgtagaatttattttttgtgtgtttgtttggatagccagttaactcaaaaccattgaactttcccactgatttatgtcacttccattatagccaagtctcatatctttgagggtctgtattagtccattcttgcactgctatagataaatacctgaaatcaggtaatttataaagtttaattggctcatagttccacaggctgtataggaagcatggctggggaggcctcaggaaacttacaatcatggtggaaggtgaaagggaagcaggcatgtcttacgtggctggagcaggaggaagagagggaagaggtgccacacgctttttttttttttttttgagacagagtcttgctctgttacccaggctggaatgcagtggcacaatctcagttcactgtaacctccaccctctgggctcaagcgatcctcccacctcagcctcctgagtagctgggaccacaggcatgcatcaccatgctcggctactatttttgtatttttgtagagatgatgtctcagcatgttgtccaggctggtcttgacctcctgagctcaagtgatcctcctgcctcagcctcccaaagtgctgggattataggcaagagccactgcacctggcctccacacacttttaaacaaccgggtctcatgataacttactatcatgagaactgcacccagtgggaaatccatttccatgatccaatcacctcccaccagaccccatctccaacaaaggggattacaattcgacatgagatttggagagggagggacacagatccaaaccctattaggatctgattcaaaaaagttttgttctgtactgtggtctatttatgtgtgcatataccaggactagactgttttaatcactctaagtttcaaccagtaaacttgtgacatatggttaggcaagggatctcatattcttctgcttcaagttttgttttttcttggccatttactcttccataagaattttaaggccgggtgtggtggctcatgcctataatcccagcacttgaggaggccgaggcgggcagatcacgaggtcaggaattcaagaccagcctgaccaacatggtgaaaccccgtctgtactaaaaatacaaaaaaattagccgggcgtggtggtgcgcacctgtagtcccagctactcaggaggctgagccaggagaatcacttgaacctgggaggtggagcttgcagtgagccgagatcgcgccattgcattccagcctcggtaacagagtgagactccgtctcaaaaaaaaaaagaattttaagaacagtctgtcaagttccataaaatatctgattggagttttgcttagaattgtactgaatttttagatttgagaaaaattatcagctttatatcaaacttccgtctttgtgagtaggggatctcttcctattcttttatatcttctttatgttctctaataaaactttataattttctccataaatatcatacacagactttgttatatttattcctaagtatcttatgatttttgttatgacaaatggtattttcttttctttttttttttttttgagacggagtctcgctctgtcgcccaggctggagtgcagtggcgcaatctcggctcactgcaagctccgcctactgagttcacgccattctccttcctcaacctccccagttgctgggactacaggtgcctgccaactcgcccagctaattttttgtatttttagtagagacggggtttcactgtattagccaggacggtctcgatctgctgacctcatgatccgcctgccttggcctccggaagagctgggattacaggcgtgagccacgatgcctggcctaaaatgaaatcttttatctgtttattgctgtggtgtaaggatattgatgtttgtgtattctccttgcccccggcaaggaaattgttatttctaatagttggtaggttcttgtgaattttctttgtatagtaagcaatctatgtatagtaattgtctatgtatagtgatggctttatttcttctttttcttcttgtgtcacttcagacttcttggcagaaaggtgaatagaaacagtaaaaactggtatccttgtcttgactttggaagttactttctattcctagttagctagattaaaaagattaaaaaagaaatagacaggttctcactatacagtggttattcacagcctcaatcatagagcactacagcctcaaactcccaggttcaacgaaccttaccaccttagcctcccaagtagctgggactacaggcacaagccaccacacctggctaatttttaaatattttgtagttcactacagcactattcacaatagcaaagacatggcgtcaacccaaatgcctatcaatgaaagactagataaagaaaatgtagtatgcagccaggcgtggtggctcacacttgtaatcccagcacttaggaagcctgaggcaggtggatcaggagttcgagaccagcctgaccgacatagtgaaaccctgtctctactaaaaatacaaaaaaattagccaggtgtggtggcaaatgcctgtaatcctagctactcaggaggctgaggcaggagaatttcttgaacccgggaggcagaggttgcagtgagctgagattgtgccaatgcgctccagcctgggtgacagagtgagactctatctcaaaaaaaaaaaaaaaaaaaaaaaaatgccgggcacgatggctcatacctgtaatcccagaactttgggaggccgaggtgggcagatcacaaggtcagaagttcacgaccagcctggccaacatggtgaaatcctgtctctactaaaaatacaaaaattaacagggtgtggtggcactcgcctatagtcccagctacttgggaggctgaggcagaagaatcgcttgaacccaggaggcagaggttgcagtgagccgagattgtgccactgctctccagcctgggtgacagagcaagacaccaccttaaaaaaaagaaaaaagaaaatgtagtatgcgtacaccatggaatactatgcagccataaaagggaatgagatcatgtcctttacagggatgtggatggaactggaagccactatcttcagcaaactaacacaggaacagaaaaccaaacaccacatgttctcacttataagtgggagctgaacgatgaaaacacctggacacatgtgggtggggggaacaataacccactgaagtctgtcagaaggggaagtggcaggagggagagcatcaggaagaatagctaatggataccgggtttaatacctaggtgatgggttgacaggtgcagcaaaccatcatagcacatgttcacctatgtaacaaacctgcacatcctgcacttgtactccggaacttaaaataaaagttgaaaaaatattttgtagagacgaagtctcactatgttgcccaggctggtcttgaacttctgagctcaagcaatcctcttgccttggcctcccaaaattctgggattttagcagtgagccactgcacctggcctccagttctggatcctgggtcttgcgacattattccatgctggcttctgaagtcaatgaggcaaaaccagaaaggggaactaaaaagttaaagagggagagggtctcacaggcaagatggaggaagcctgggatgaaggcagggctgtggacctgaatgatgccaggaattaaggaggaagtaacagtgttaggtaatagcacatgggattcttgggctgcagctacaggagggagaatcatggccttaattcatcacctctgaaatcctgaaatatctagcctcctgcccagatcctgccatgaatgcatctattcaaccactatttataaagtatccagtgttaggtccagggagtggcaagagtgagcatctgcagtcatagtccctgccctcagggagcttacattcaatggggcagacagacatcagtctgtacataatcatcaacaaatgtagaactccaacagggccaagtgcctctgaggaaaggtacaccttagtgtgagcgctcataacaggagaatttgaccctgaaaagaaggtcaggaaggcttccctgaggctattgagaaggtgaggcctgaagaatgaagaggagctaagaggagaggaacagaggaaggagccgttccacagagggtccagcctccctggagactctgtgcaggaggaagcacaaggtggacagcaactggagcacacgagtgagggggtgtggtgggagatgaggctggagaggaggggccaccccttgcagggccttagaggtcaggttaaggacttgggtctttaacctaagatcaatggaaaaccactgaataggtttaaggaggctgactgaaacaatcagatttgcatttttaaaggatccctcttaggtgtgtgtcatactgtagagaaggccattcccagcctcttcagctactgcaatgactcagagaaggccacatggtccacatggtggctagcccagggatgtggagggatgaaaacgagtggacagacttgagatatattagagcagataaaatggataggactaggtgctggattcaatattgagatgctcattctaaaccgcccctacatcaaatccttcgaaggcaggggctatgccacatgactatgatacccaggtcccagaacaactcctgacacatggtagactcaatacacatttcccgaaagggtggaaatgattagcagtctctcaagtaatcctttgaccactaagcgtatttaatttcttctagcatgtgtcagtaatcaacctccttggtacatcatagggagaaatattgccgagttccaaagagtatactctggggcaagttaatacaagaataaggtctcacttaccctataacatgaagagtaacagtaaactcgtaagaacaggacctggtgaagcaaggagtaggcacaggaagatggctcatcaaataggggcgccgggtgtagtgtgaacacctgaggcaggaagaacccagtagcctctgggggttgggtgggattagttgggggactaggatttgatggtagggggttgtcctggagatctctggaaattaagttatctattttttttctgtttttatttttataaaagaactcttaagggcatttttttctttgtttgttctgttttgagatagaggttcactctgtcgcccaggctggagtgcagtggcgtgatctcggccactgcaaactccgcctcccaggttcaagtgattctcatgccttaacctcctgagtagctgggattacaggcatgggccaccacgccttgctaatttttgtgttttttgtatagccagggttttgccaggtttggtcaggctggtcttgaactcctggcctcaagtaatccacctaccttggcttcccacagtgttggaattacagccatgagccatcatgcccagcctaagctatcactttaaaatgacccttcaagaaagtcccaaggagtctaatccatccacgacaacagcacgtctgagacagcctagtgaaatttctccgatggaggacaggagatggaaaagtgccccaggacctcttatttatataaaaaacaaaattttttaagaccctgagaagtatggattcttctccagagaaaagttcctggcttgggagctcccttaggacttggcactttggtctagagtgaagtggacctggccattccagctttgagtgggttcaggcgagacactcgagctaccccttatggttgctctgaaggtcaccctggctgggagtgggtggatctctgctctgttatgcctcccacaggtggaggaagtctgtctctgaggctgccctgccaccctcatagagcgctgcagattgggggcggtgatgcagccacaggggctctgattccctgcctccccactgtgttcatctcattcctctccacatatgaggcctggtgtcatggcaggtgggtgttccaagtgaaaccacagccacagaggcaagcagtagagcctgtccctgatgtggccctggtgatgctgcaccagcctggggctgtatcagaaaccatgcctgcagcctttgcttctgcagacttgctggtgctgcaccagccctgagcaatgtccatagcccttgcctcactggtcactgtgatggggacgcccccaggtatggttctgctgctggtgttgcaggttggagtgggggccagcaccctcatctaccacaagaaggcttaggtggcacagacgtaaggctgcttgcctgtgtgtagagtggcaggctgcaacgggctggagccttggggagaggcccttgccacactggtggcagtgattgggttcaggcaggtgtgtgccgcagtgctgggccaggtgtgagctgtggcaagagctgtggccacactttctgcaggagtagggcctatcacctgtgtgaaagtgttcgcacagggtcaggtgggccccttggctgaagtacttcctatattagggggaggagaagggccccttgcccaggctgtgctgagagaggtgagagcagtgggaagagactccacattccaggcaggaaatttgagtggatttgtgggtggagatgggggtcccgggtaggggagttggggaagggttggttgtgacagctggcaggtaaaggagtgccatagtaggtagagggctgggtctgtcctctcttctcctcctcctctccctttgctcccagcctgcagggagaggggagagaggtgagagcagcatgggggaggaggaagcagaggagacagaggtgggagaggagaggctaagccccacacccaactgaagaagtggttggcggtttcagcggcacctccctcctcgctgaggtggactgtgaaggtggagaagcccagagcacagcctcctgtgagcagcttcccagggtgttgagggctgccaggcaaggacagggccctcagagttaggccttgcctgggcaggggtctcctgggggaaccttccctcagggccctgaggctctgggctccagagctcagcttccgcgttcagatacatggtctgctctgctttggagactgagaagcctgagaggtaaaatcgtgctgggtggtaggtagggtaagggagagggagcttccccccatctccctcacccactgcagaaaggcttctctgtttccttccccagcccagtcccacctcctctgtgaggccgctcctcacctccctactggcctgcagtgatcctcctgcttgggagtcacagagcacccctacacgggccctttgccattctttatagtataaggcaaggccgtaacattttgtggggcatcttcttcagtgtcctcagccttgtgtgaacatcagaagcacttgggggcttgggaaaatgcaattgctggccccatctccagtttcttaaacagcagatctggggtggggcccaagaatttgcatttctaacaagttcccaggcgatgctgatgctgctagtctgggatccacactgggagagccactgatctgttaggcgtgtaactttacttgtattatctctcaattctcagggcaacctgttactctcccccattttgcaggtgaagaaacagagggaagacccagtgccttgtgcaaggtggctcagtttgtaagtggcagagccgatttgaacccacgtttgtctgactctaatactgtatcaaccctccttcctctaccctgttcctctgcattgtcaactattccacatgtatcttgttcctcaacaaaatagtaacgttttcttttgcatactttatatctctcaccttgcctgacccagtaacataggcttggttgggagggactgaaggacttggaaaggaaatgccccagtggagccaggatggaaatgggttcctctgtgtctcccacatggtgtcacctaaataaacagccatgtctgtgaggttcagtcatggggagaggagggcaagagagcactcgcaccaagcgatggggttagggggacacgaaaggaaatgtgataaatagagaggggggcgtgtggggcaaaggtgaggactggggacccgggagggggcaggctgtttcagagtgaaggcaggacgggcagcagagacagagaagaggctgccgggtggttagggctggggaggacaaggagggtgaggacagacgatcccggcagcccctggagccagaagagaagtcaggttaactccagacttttggcttccacctctgtatctcacccaactcctccccacctgcttctctaccctgaaactccaggaacaacgcccacctgcctcccactacaacttccccttataccgtacacgtcctggatgcttggggtccgggaggaggggagtcaggatcacgggttccagggaagtgagtgtagaaaggggctcctacgagggtagaagtgggtgttgtctgcttctgcaggaaaggggccagccagcccaactggtccgcagtacttgctggggctggaggatgcccacctgcatctacgggattgagggtaccggagaggaggcgaacaaacgagaaatcccaagggtggagaagggagccatgggatcggcgggcgggccgcgcagctgcggaactgggagggccaagcgggctttagggggaaacacggccggctcctctgccagtgagacagagaactgagcatgggggaggaatttggggccagaggggctgggggtacccagagcagaggaaacaggaagtgaggggcagagaggttacgggtggtggaaggaacagcagtcggttctggagaggcgattcctcttccccgaatacctgcactgccccggaccgggagtgcagtcgtgcgcccctgtccccccagcctcaggcttggtgcccagccccgctcgcggaactcgaggccagtaaggcagccgcggctttccttgatgcccccactcctctgctctcagccgctgcctggacgagcacagaactagtgttcccaggcgaccctccctccgctcagccccgctgcccggcgggcaaaggctgtgcactcacactccgagtctgcagcccagcctgcccttttttgggaggtggcccggggactgggatgtcgaacagggagcttctccgcagtcctctccacctccctccctctttccagctatagaaaccggctgctcgcagtgacttccaaacatcacggtcattcccacatctacacacatccctttctcttttgagccattttcctgctttccctttggtgttgaaaccctggatttcagcctgggcgactcaggttttaggggggaaagtttggggtctaacttggcacctctgttttttatcctctcttccagcttcatagatggttcctattttcatacatatttgctaatttggagtttccgacgacatatctcgaataacccgacattttctccccatttccaaggctgattttacattatttctaggcctccctccccaatctattttcctttctttttcttgtacacccctgataaacagacacacagaactgcaggtttcaaagaggaaaaaagcacgtttgttgttggtaggcgggcgtgaatgggagggttcttcaccttctccaacacctcgtatagatgggacgttgcagggcaatagaaaaggcagcagatgggggcgtgttttgccccactctgtacaatatagaagaatctcatatagatactttgtataaaagccacgtgtcctcatttgtgtcctcttattggctggctgggctgggggtactgggggacaaagaagctggggtgatagaccaggacacagggataccccatggtccccttcctctggctgtcccctggtggggtcactttggatccttggtgggagcatagcacagctccagtggccgggacaccttccagaatttctcattcaccagctccagggtcagcgagccattcaacgtctgaggagggggtaaaagggagagaggggaaaagagagaggaaagttggagaagatggaaaaggaaatgaatgagaggcaaaaggtgaccaagggaggaggaaagaaaaaaggaataataaaagcgataaggcaaaaaaggacatggatgatgggaaaggagaggggacatagaaagagatagaggatgtataggggaagagtgctgatgagttagaccaggctcatggttctatgtggcccagaccaccctccctcctctcccctcttctaccactgccctcagaagctctcaccgtgaacgccccgcctccaggtgcgatgtagatggtgtactgcttttcactgacgccctccaggctgggcaaagcaggctcctcaggaccgtcacctcctccggcacccccaccctccccgccacacccatcaggtcctccggtgtcagaggcgccccctccaggccctcctggctcccctgcttcctgctgttgcctccgctcgagggcaatgcgcagggccaagtacttggagaggtggtccactgtggcattcccagttgtcttcacatacctggaatgggagggaggacaggcttagagccagagcgcctcagatgaggactggaggtaggggctttccaaaatggattctgggttggggtggtattttgggtttgggcaaagcccacttctgatggaaatctaggtgatctttggtttctcagtggctggggaaagacagggctcctcacctcgtctggcagtattctcccttctccacgagcagggggtggggccggaacacgagctcaatttctccacctggctctggggggctgggggccccaggagggcttggggggcccagcgttccccctcccagagtccctccccggtcaccagagtcttccgaaccggcacccccacccaccccaccagtgccgcctccccctgtccctacactgctcccccctgcgccccctccacggggtcgcttgggagcagggcctggggcagagtcaggggcggagtctgagctcacatcttctccatccccttctccctccccgggctctccttcccccccactcatcgttgtggtctgatctgaccctggtatcggccgcctcacacgctgggccctgtagaagcaagtggttaaggttagaaggcatccaggataaagggcttagactttaaacttcagagaattaagagataagaaaaatcctaatgacgatacctaatatttattaaacacaatgtgctaagcactcagtatactaagtgttttgcaccaatccccttacctaatacaatgaatcctatgacacaggtaattatattacctctattttatggctgaggaaactgaggcttagagaggttaagtaacttgttagtgatcataggctgtcacctctcaaagtgcggtagcagcatacacatcccctgtgagcttgtgaaatgcagactctcgggcccaactctagacctactgaatcacagtttgcatctgaagatctacaggtaatctggatacacatgaaagactgagagatgctggcctaggaggtgatttaacttccagcagtatgaatccggggcttattctcaaaatcgctctactgttctaacttctagaaagtcatggggtaaactacatttttcctttttttttttttgtgacagggccttgttctgtcgcccagcaggctggagtgcagtgtgcagtggtgtgatcatggttcactgcaacatccactttcttcccaggctcaagtgatcctattacctcagcctcccaagaaggtaggactacaggcatgtgccaccatgcccagctaaatgtttaatttgttgtagagatgagatttccctatgttattcaaggtggtctcaaactcctgggctcaagtgatcctcccatcctcacctcccaaagtgctgggattacagatgtgagtcactgtgcccagccctatatttttcttaagaagagcagggccagttgtttactaagaaactgcaatttacacccatgatttccagccctaatgatcagtctgtggtcagctcctaggatgctgaggcttagaagctagcaggcaacaaggactgacccacggacccatcccatcagttctgcttctctcctgaccctcacacctgtgcatggcctgcatgcgtagcccctcctcaatgctggagctcaatgcctgctggttgtgcaggcggctcaggcggataagcactcggtcttgatgggcctcgtattcctcccggctaggatagatcttagagatcagggcatcaaagttggggtctggccgtagggatcgcttggacaccagcttctttcggcaggtaggacactccttgttcctggggtaggagaagggaagccctgagtggtcagtcaagggaactgaagcctaggctgaaccaagaccagtgagagggccctaactttgtaccccttcatctcatctcaaacatgtctctcctattacccgctccgtagggctgtgacaatgcagtcagagcagaatctgtggaggcactccttggtggtcatcgtattcttcagcatgtccaggcagatagggcacatgagttctgaatgcagtgaccgaggggaaacagcaatctctgtgccatccattatggcttcctgaaggcatcagtgagtagaaaggtggtgtgggttagagggaaaggggttttagaaacagcagcccataaaataagaattttgagaaatacagtgagaagacccatgttggtctctataggagacaagaattctgagaaagagaaggactgatgacttggagcaaatggagaaaagacagactttagtgtccattaactaagagtaggagctttggaataggaggatctgaggtggctaagtggcctaggagtgaagatggcacaaatctgtggttgggaaaaactattcaacaaaattttttaaagtcctggtgctacctgtattagaaccccatagggtgcctgttaaaaattcagattctgagaacccaattcactactgaatcagaatgttggggggcatgaagctctgcttttaataaactcccaaagtgagtcttatgtgcactgacttatgacactgaatgaggaacagggaaggtaatttttgtgtttgtgatctttcaaatgaagataataatacttgttccacctctctggcagggctgttttgaggattaaatgagctaaatgcgaaagtgctttggaaagattaaggtgattcaaaggtagggccaggcaaggcagaatagagcaaattacggaaaagaagctgtgtgatgcggtctgtggatataagggtttgggggagggggtaagcctgaaagggagaatgcctgtcacctgcggggtccggtgcagctcatacagactcagttcccacgttttgctggcattctgggcattcgccggcgtcgtcatggtgaccgggcgcagaccccccaccagggctccacagccgaggagaaggcgaagaaggctgggggtggggggaaggggaggagggcgtcaggggggccgcccctcgcgtagaccccgcccctccagaagcgcccctctccgcccccgctcccgcccccgcgccggcactgcccctcacccagctccagccgttcgcgctcccgccgccgccgcgcctctccctaggcccgggctcctgggccaagttcgctcggtccgcaaccgctgctcagacagcagctcccgccaccgccgccgccatggcccgggcgctggggccctacgtcacttccgcctgctcctccgctacacccgctccccccgccggcggagacgtcacccaccattcgcggcgcgggtgggacgggacgtggacgccgcggttctcccgcccacgggacgggctcgtcccgcgtgaggatcctgcgtcccgggagttctgcgccacttagggaaccacggtctccgcccccggcccagcaccgtcgcgcggccaacaaccttagcctcggttcccttccagaggcccccacgcggggcctcagctccggggggccggggcctggaatatctgggaccccaggaggggacagagggctcgtgaaaagggctacctcccccactctgcgtaccctggcgactctggggatcaacccccctcacttctccgtaacccccattccaggatcccgggggaaaaggctgcaaaagatctgccgctttagccttctagtcctgagaacacacctaggtcccgatgtgcccgggattccccttaccaccctggggactccctccaccctctgctttggctctccctagaccctccgacccgctctcccgctcgaggtttgggggcggcggctcgggacgtccagactcaactctcggccggagccatagactcgagaattgcgtttggacaatcaggagccgcggcccggggcggggaagggagggaggcgcacgggaggaaagggggaatggagacaccacgcggaaacagggacatacacaagatggagctcccattgggaagggggggtgcgcgtgtgggtggggtacacaggggcagaatgtctggagtgggaagtgggcagaagcctcttcgaggactctagagtaaacgaaggggatggggaggaaagagaagaggaaggggcagagcgatccccattgagtgtagggaatgagagggatacagggcgagggggtggggggcagttagagaccctgatgggcatcttgtccccgcccgagctgaggctcccggacttgggctgcggctgccagggggtggcctgtccctgggacaaggcagcagtgggtgccctcgccccccaccccagttcccccctacttccctgtcctctccttcagtccgtggccagtccttatgtgggcgccagagtcgattagcgcagacccccctccccttcctcctcctcttcccagccccctccctcctgctctctccagcccctttcatcggctggttcattcccctaatcctggccccctcccctaatcccccccatccgaccccaggccggctgcagctattgtaaggtggagagaaaggggagggggggactcagagaaaggagaggggtgggggagggccacctgttccaagaccccctttcaaggccagactggacaccaagatggggccatgaacaaatcacccttggggaccataagaacccagggagttggggggaggggactggtgctgcagaaccagtggaaaggggtgacgcacgaacccctcccttcaaaaagacccggagtgtcacgcatacacagtgacacatactctttcctctcacacccggcggcgggggttgccctgggagaccaggcagagaaagggaacaatccttcgggaaagggaaaggagggggaggtggggaagggtctgagggcttggacacaagaagagccggaggtggcagggaagaggacttggaatttattagggtcacaagcacccctgcttcccatattcagcattcctgaaccatacactgccaccccttttgtatcctgggaacttagagtcctcatcagcaggaggccaggcagagtggtgggggggtgagcagagtccagggtccttgaggcagttacatgaaaagacctcctgggaggggcagaaacatttggacagatgcatgggtggagacacaaatgggctagggggtacccacttctgtccctggccttgggaacctctgcccttcccagtggctccagactccccttacttgctttctcatatagtctgggttctacttctctgccctctccctccccatgctggcctcataccagtgacttccactgaggtccctgtgatgtatccactatcttcagatgccaagaatgcgaccacatctgccacatctatgagaatggtggggagagggcagaattctgctcactcccatagacccaaaacagccataatctcccaccaaagacatccctccccacaaacctctccacagacaccaaccaccagtcccctagaaaatccccaaactttggggatctcttcattcaggcccccttcccagggaccccactacattcagtgctcaccctcagggtcccccaagtgtcccatcgggatcatttcagtaatctgtaaggaaatactcatgtgggtgaaagcttcttttatggatttttttgaagactgagtctgtgacccttttttgtcttcatttctcatacattcattgaatatttaatgtttgccaggaactgtgcccagtattctctctctctctctctctctctctctgtgaagcccagagagattgagtctctgaatgattctgccctccacccacagcctcctaccttgtccaccactttctgtggcactttctgtgtcatgggtgttgcaatgaaccctgggaggacagagttacagcggatcccatgtctgtgggaaggagagtggctgccgattctggagagggctgaatgctggtacctccctcagaccccccaggtgctccccagcaccctcaagcatctgaccaaccgtccaagctcccgggctgcggtctgggtcagcccaatcactccagccttggatgctgcatagtttgtctgccccacgttccccacctataggtgagtcagagatgtggaatgagtcaggagtctcaaggaggggttctcctctctataccacttggctggctgacctcgtccaactcaacctgacctttcctacgatgctactgatgttgatgatggaaccacgacaaccattggacaccagggcttgtgctgcagcctgagtgactaggaaggtgccctggcgggaaagggtaacaagggagaaaagatcagctggggtgacagccctcctccaactccctccccaggctaagggggccaaacgtcgcaggttcagagatcgccaccttgaggttgacagctatgactttgtcccagtcatcctcagacatgtgcagcagaaactcatcctgggtgatgcccgcacaggacacaacgacagatggtgggcgagaaaagcaggcctatgggagggggaggttacgcatcaaaaaccccccacaaaaagccggggcagtggaggcaatatcagagctttagagggggaaagtggcctagcgttcacctgcacttgttccagcaggcacctggcggccctggcctcagacacgtcagcctggaaggcagcatggttccctcggggcggcccctccttgctccctggcccgcccagcagccgcaccgtctcctgtgccgctgcccggtccaggtcgcaggcagctacggtggccccctctccggccaggcgtacactgaccgctcggccgatgccgctccccgcacctgaggtaggacagaacacgccggaccgggcacggggaggagagggcagggatcagaggtcacagggcagaaagtaaaatgtgggtaaggggccagaggtcacagcggccgcgcactccaagggcacgcccctgacctcactccaataccccaaaccgcccggggaaagaaccccctcaacctgtgaccaaggccagtgcggagcggagtcggttctggagctgagacgccatggcgggctgtgggtgggtgggaatcccagcactaagccaatcccagcgcagaggggcgtggcaagggcaaagccggggccaatcaaaggcccgccagccttaggccatctgcggccaccagcgcaggccgacctcccaccgagggggcgtggcccgacactgctgcttaggggccccgggtgtggagaagacaaggggccccattccccccaaaaagacaaagactgcatgtggggcggaagatcggaggtctttatttccggttaccacccctccccctcgattcaaacacagtgatataaaaggaatagaaacaaaaaaaatcaggccatgagaataccaactaaccctctcccaccccatccccccaatcactcccaaatcaggacacacgattgatgtttgatgtttatccccgactcctcctgttaccctctctgtccaggactctggtcttccctgaagcctccaccaactggtgggagaaaggaaactggaccttggagaacttcctgtgtagcaacttggttctccgagaacaggtggggtaggggacaccaggtaggctgccatcaccccctgtcccttccagccttcttcatggccccatttagccttccaaatgcaacatggtcagacagtgcccaacactatggtccctctggcctctcattctcaccgctccagcctctgtaagactgccagcccttgaaggccctaatgccaaagtaaccattctcccaggctacagttccttcctttggcagatgtccctggccagggcccccaacctctacgcacccctgacctggagttaggggtagaggtttggggcaggggtagtttatccacccctcactcaaggtgggcaatcagcaccatcatgataactccccccagcagccccagcacctccagaagtgattgcaatggtgatgcctccctcagcagctcgggcaacacagacactgttgctacgtagataaagccacctgcagtaaatggcaggacccagccaggacctgcaccacctgcaatttcactgcccactgctcctccttcagtgagaagggcacaggctgtgcctgccagtgcccctactgctgtcagtagttgcagacgcatcgcctgatgggcagaaaagagaaaaaggcactcaccaatagctaaagattatcagtggtttagaagtggctggtggggtataggtataggggacatggatttggaaactaaacatcaaaataaaaagagaagagggagcagtctagaatagacaatttctgaaaaatcttaagagatcagaggtcctttccacagactttctgattgagtaggcgtgtgtgtgtaagactccactaaaccattcagatggtttatagaccagtttaagaaatactgagctaaaggacaaagtaaccagaacttcttccccctcatttctagaggacttgtcaatgacagtatgaattgtttggaactaataagaggctgtttgggtttagggtgagtgaggagagataaagggtttgaggcagctgtgtttggcagacatcaccaacctgctttttgctgcagccagactggaccaagatggcaaagtctccgacctcgtggggcacttcatgtagcaggacagtcattgtggtcaggatccctagtccccggccccctcgaaaggaagccccaatggccagaccatcagtgaagttgtgtgccaagtcagcagccagattcaggtaccccgacacacgcaggtcttgtacaggacaagaagagaaaatgatcagaggcttccatcaccacttgttccagtcttggtcagctattctcacacctcccctcagagaccactttacacccagtcctttagtgtttctcagatacctgccattacccacagcacatattccatgtgatttgtgatgatgtcccttgcccaaatttatcaccaactctggcccttacctaagcctcttttttcttcttcagcgttctgaggtctcactggcccatctttgggtactgtgctccctcctcgcctcttctgaacccctcttgtttccttttcttcttcctctgagctctgcttctccttggtagaacgctctgagggaagaaaagagttggtcagagtggagaacagatcttccaacatgtcctctccctcctgagggccataagatgaggagattctgaggcaggcaagtcagctttcaggaaagttgttcctgggctcaccttgtcttccatgtccatgacttccacgtgtatgactgtgagcgtgtccatgtccatgactgtgaccatgtcctcctttcacatgtctcacaaatttctccacgacaagaaaggcaacaattccactgagaacccacagtcccacagacagaatggggccctggcctgggaatggaggcattgagacattaagggagatgtgcattccagactcctcctcctcaagtgcgggaggtgaggaatagggagagacggaccttccccagcaccccaactcccatccccatctgtctcttcctcaccactgtgggagtgtccatgtccgggttgctccagagtgtggtgagaatgaggttctggaagaaggggggaaaaccagatgagggaatatctgacacaatgagtgtgtatttgggggaatatcgaaaggtcagggatcataaaggagaaagaacccttttcctccaaagaacgaaataggttagatttgaggtagaagtcagaggttacttaccaagagcatgaggaatgaggtgcaggaaagcatctcccaggagcccaccggaagcaaaactgagcaagatctgaagtagagagcgatgccggggagagttcgactccacggggataaggaagaggacaaaaaatggagctgctgagatcagcactgtggcccccagtgcctggtgagggagagtcaaggtcaagtactgtggagtttcccaacaatccagaaccagcccttctctctcccatcccctggagactcacataagcccagagagtgacagcatccaggtcctgcttgatgcctggagccccagactccccatagcctccatggctatgctcatggtcatgtccatgtcctctgtggtagaggctctcatgggagtagccatggctatggccatggtgtaaatcctcatgtgaatgtccatggtcgtgatcgtgggtatgtccatgccagatgctctcgtgagtgtggccatggccatgggcatggctgtggccatggtggaaatcttcatgtgagtgcctgtggctgtggccatggaagtcctcttgcagatcgtcgtgcaggtcgtcatgacccccgagtccagccaccagaagccccaaggtcgcccaggtcagcagtcccacggccacccagtggggggcccccaggcctctggccatcacgctgaccagagggacagaggcagtgactccacttgactcaactctatacctacacagggtccgctttactccaatcgcgccctccgtccacctctatgggccgctctcccattcccttaagttcccacctacattgttcccaagactagttctctttatcccgaaccacctcccggatgtagggccctgggacactaatctttcaccagccactttacagactctctgggccctcgtctctacgactcattaggtgaggaaaaggcctggaaaggatggtagagaaaaaacagagaattctcaccggctccgggatcctctcctttcccggtttgcttggacgtggcagtcccgcctttagatcccgcgagaacaggaagttccgttccaccttcgccctaatgcctttaccaatatggcggcactccggtagcgacgaatccatcctgcactgacacgcatgcgcgagtgtggaggtgatttgaggggagggtgggcgaggcgggctaacaggccggaggagaccgcctcctcggtttccaactagacgagggggcgggaactcgcgccgagacttcccgtctgtacaaagatggctgccacattggcgctgtcattttggtactgagcagagcgacgggcttaattcgacccaatccaggccagagtctttctctcaggggcttcctcgtgctcagctaatcctccgatcaatccttgggaatccctgggacctcttcggtatccctactctcagccagggatcatgtcttgggccgctcgcccgcccttcctccctcagcggcatgccgcagggcagtgtgggccggtgggggtgcgaaaagaaatgcattgtggggtcgcgtcccggtggcggcggcgacggccctggctggatcccgcagcggcggcggcggcggcggtggcaggcggagaacaacaaaccccggagccggagccaggggaggctggacgggacgggatgggcgacagcgggcggggtgagtgccccagcagaagggcaggcgagccagtgaccgctttatctgcgacccctcccccacaccctcccccggtgctcttttccttgcgctcccgcccccttgtttgtaaacacgcgtcccctccctcccgagggccttagcaccctcccccccggggcggggcggggaaggggagcttccgccctcctagctgtgaccgcttgaggccttgggcaccggaggtcgcgggcctgggaagggcacgattcctcttaaacctcaggactttgggcgtttacaggcagatcctgcgtcttaggaggggtctctcctgcctgtctctttcccttgcacgctctggctacctggctttacgctgggaatagaggggctcgatggtctaccccacgtgctgccccacccacgagacaggtgtggctttgggatgacctggtattcattcaaatggattggttggaaaattttcctcacctgaactatcctcctctccttgtcaactccctcctctcaccacaatgaggagttacgctgtttttgggtttttttagccagtcaaatatagcagtgggaggttgtataccaattttagtgacacaaatgttaataagttctgataacccactaccatcggaccagccggagttacactgttgtttgacagcagggtgtctctgaacttggggatgggtggagtgggctgggtccggcacggtggggtattagagaattaaagtctctagttggatgtttgaagactcattttctttttttgtctcttctgtctcttgtgtgtctgtgtgcctgtacatacccctccctcagactcccgaagcccagacagctcctccccaaatccccttccccagggagtccctcccccttctcctcctgggccacccctacccccttcaacagctccatcccttggaggctctggggccccacccccacccccgatgccaccacccccactgggctctccctttccagtcatcagttcttccatggggtcccctggtctgccccctccagctcccccaggattctccgggcctgtcagcagcccccaggtgagaggttgtgaccaacttactgcctggccactttcattttcttgttttccttgtaaccccagatccttgtgtgaacttccccatggcccattgaccttccaatcctctaaccttgtcaggcctgtggtctttatgagaccccttgcctttcctgaggtgactgatctttcagtgcatgcttcctcccctaaaagaactctaatattctttgtttttgtgtgtgtgtgtgtgtttttttttttttttttttttgagatggagtcttgctctgttgcccaggctggagtgcagtggcacaatctcagctcactgcaacctctgcctcctgggttcaagcaattctcctgcctcagcctcctgagtagctgggattacaggtgcctaccaccacgcccggctaattctgatattcttgatgtccttttcatctatctgattttctgcccttttgatcccatctgctttcccaagacacctgcccttcagggtcactgtgttgcacaatttcagggggggcctgtttattcactttggggttgtgctccagggatggcctttcacatagactgcagtgtaaatgacagcctctggaatgtgcattgcagggccttgcttagtggtagggaatgatttccatcacttctgtgacattctgcttcccaataagtcttcctgtgacttccctatttcccccatcccagattaactcaacagtgtcactccctgggggtgggtctggcccccctgaagatgtgaagccaccagtcttaggggtccggggcctgcactgtccaccccctccaggtggccctggggctggcaaacggctatgtgcaatctgcggggacagaagctcaggtatgtggctcagaggatgaacagagagggagagtctgggccatgtatcatcacctgtgggattcccagggcttatggagtttggtcagagcaagtgacctgggggaggcctgatgggagtaaagaagctgaagctgagatgtaggacgcgattggggggaaggtcagagggaaaaggaagcagcgtgtagggtttctgaacagtgaggagactgggactggatcatcactcagctcctggttccctatctctgtatttggcaaacagggaggactttaagttttgctagggggagattggaaacagactaaatggtgaaggtgtctccatgcaaccttcttattgctcctcccctttccctgtaggcaaacactacggggtttacagctgtgagggttgcaagggcttcttcaaacgcaccatccgcaaagaccttacatactcttgccgggacaacaaagactgcacagtggacaagcgccagcggaaccgctgtcagtactgccgctatcagaagtgcctggccactggcatgaagagggagggtaaggacccgccctgcccaggcgtcttagaccacatgcccttctcccttatcccactcagactgtgtacctctctggaagggtggactgctctctctcctctagagggcgatatttgatttctctctcccttcgcagctctcctccctgttaccctgttctggcccttgagtttccttcttaatggttaggcctctgtggcctgcacatatgacccctccctagactgatcctaggataggataacttttccttagccatgatgggctgtctccccatttctaacctgagtggttcctcctctgattccatggaccttctctggtctctgtctcctgttatctgtgatctttcctctaactcctgggactgggcactcttaagcttacagactttactgaagacctcagggcttcccttccttcttctgtgtctccatcttatcttcttaagtcagattcctaggattctgagagacactttagagcatatcttggtcaaaacacccactttagagaagatgagcctgaggcttggctttcccaaggtcatgcaacaaaggagtggcaggcaggtttgggatcagaacccacatcttcaaagacctaggccagtgctcctttcactgcctatttgttgagtcagaagagcacaagatttgcactcagacacacttagagtcagttgtatgacctgccatgtattatatgaatttaagcaaactaatctctttgaaccccgagttcttcatcttaaaaatgagaataaatgcttccagcatcattatgataattgagtgaatggtaaaatgtgcttagcatgtttcttggcatattttatttaaaaaaattttttttttcaatcagctttctcaggttgaatcttggcatgttttttttaaccatgtagtaggctctccatttaaattcctccctaattcttttacctacctcacccttcccgactgacttacctgcccttttataacccttccttcagggctgcccccagtccaccctttctagtgacttccccaattcctataaatatctcccaagggccatgagatcctgatgaggccgtaaggatatttgtggaaccccttcatggctggctgctgactttccattttttctctcccccttccccctgcagcggtacaggaggagcgtcagcggggaaaggacaaggatggggatggggagggggctgggggagcccccgaggagatgcctgtggacaggatcctggaggcagagcttgctgtggaacagaagagtgaccagggcgttgagggtcctgggggaaccgggggtagcggcagcagcgtgagtgttggggtcaatccactctccttcgtgatgggggttgggggaggcagtctaggtctgttctacatcccctccccctcctttcccctcataaccttcctaacactacttgggactggaggtgctgccaaacaaggtctttcaaacatctgaggtggatgtgatagctccttctgtctccactccccaaacaacccactggcagaaccataggcatgtcccaaataaataattgtttgcactaatgccagaagagaagactcacttacagggattggtttggatggggctcacaggaagactatatgtaaggagggggtgtcaaaagcctcttacaagggggctcccagcatatctcaaaatcttccataactcttacccccgtcccctgcagccaaatgaccctgtgactaacatctgtcaggcagctgacaaacagctattcacgcttgttgagtgggcgaagaggatcccacacttttcctccttgcctctggatgatcaggtcatattgctgcgggcaggtcagtgaccttggatccctttgacttcttgacatttgacccctctttgacttcccgatctttagtgaccccagtggccttaccttgcgtacccagggagccaaacttgctgacctcgccacctcttttctccttctcttccactgatgtgctttgaatcccttggcctgatttctggctcctgacccttgctgccccacccaggctggaatgaactcctcattgcctccttctcacaccgatccattgatgttcgagatggcatcctccttgccacaggtcttcacgtgcaccgcaactcagcccattcagcaggagtaggagccatctttgatcggtcagtggccctcggctaggctggcatgtagatagagggggtggggctataggctggtccgtgtccaaggctggctgagctgtgacctttgagtgacctgcaggtccctctccagggtgctgacagagctagtgtccaaaatgcgtgacatgaggatggacaagacagagcttggctgcctgagggcaatcattctgtttaatccaggtaagaggaggattacctttgtctctcaaggccaaggcaaccttggagcctcctcttctccgagactcctaagttacccagctatccccctcagtaagaccctcaacctggaaatctcccaactggccgaggaaaaacccacatccacggatccatcccacaaacccagtgggccctgcttcccttgccaggcctctggtaaagggcaagcaagtgcagcccaaaaggggcatcctgtggctcacatctgcatggccatcctgatttggtttgtcttcatttctcttcctcctctcttccctgccatcccagatgccaagggcctctccaaccctagtgaggtggaggtcctgcgggagaaagtgtatgcatcactggagacctactgcaaacagaagtaccctgagcagcagggacggtgagatggggctggggggcactgaggctcccttgggggtggggagtgctatgaggatgtgttcagggcccgtgtgcttccagctctcaatccccttctcccacctccaccccaggtttgccaagctgctgctacgtcttcctgccctccggtccattggccttaagtgtctagagcatctgtttttcttcaagctcattggtgacacccccatcgacaccttcctcatggagatgcttgaggctccccatcaactggcctgagctcagacccagacgtggtgcttctcacactggaggagcacacatccaagagggactccaagccctggggcagggtggggggccatgttcccagaaccttgatggggtgagaagtacagggcagaaccaagaacataaaccctccaagggatctgcttgatatcccaagttggaagggaccccagatacctgtgaggactggttgtctctcttcggtggccttgagtctctgaatttgtcgggttctcccatgatttggggtgatttctcaccctctgtccttcccccagcacaaagcactggccttgcctccaggaccttgcttccttctcatcttgcctcattttgcttcccatctgaagagtggaaatggggaactcccccagaggtggatactggggggcaggcctcccaagctgatggacatgagagtagggccctgacaggccttcctcctctcaaacctggcagatgggggcctctctggaagagggaggggccctgtcactgtccagagtctctttttacacttcacctccttctgcagtcagactgaaatataaaaaaggtggtggtggtggtgaaggggctggtggagatgtaggaaccgatctgctatttttaatttcctgtgaggatagagacttgcagttagactcaaagaagtactgtactttcccaggttgactaagaaatgccagtggtggaggtgggtgtttgggaaaggcagggccctgaaatggcctgtccctagggctctccaagcactagccttcccagcttcccgccgccccccctatctcttcctgtctaacttggggaaggggcctgggctgtgaggacagggcccccacaggggatggtttcacgagtgtagtcccggaggccttccctttacagctctcctccagccctgggcacatagcataggctggggacacaggatcctggcctgagaattgaggggaggtggccagcccgcagaggtggggtgctggggctgcatgatttttgccctgcgtcccttctctttggggctcctttcccctctcatacataaaatcgctttcaaattaaaatcgctgttttctggactgaggtgactgtatgaggatgggcagcgccgtttcgggcttggggggggtatccggttgggagctccggacgcgatccctggacgccgccgccgaggttccgtggggcccaagaggtgcacgcagggtgggggacacaaggcaagctttgtcggggagggggggagagggtgtgccaggctgggggcggggccggccggaggaggaagggggggcggtggattctcaaaggcgccttgttcgctcgtgccctctccgcgccagcgggcggcggcgcctcggctcgctgcggccttccctccgggcgcgctgcgggctccgggcagacccggcgccgtgcccgctcgtgggggcgcactgggcgccgagcgctgcgtgcttctcaggcgttgcccgcccggaggcggcccacgtccccgagtgaccccatttccctggacccttccaaccagagtcgactgctcgctcatcttaccactgctccccctctacctcggctctgggactccctaaccgcgtcccccatttgcatctccttggacctgactatcctgtgtttgtcggtgggtcccagtctctggcctcttgctctccgtagaacaccttcccccacatcccccgccccagttcgtcgctatctatagccttgtctataaatacccccgccccggcccggctctgtaattacacggggcggggtgagggaagtaattatggagacctgattatgggtggggtggggactgcgacccccaggcccgcctctccccctcccactgtgccctaaatcccgcccaggcctctgctgaaagggggctctgggcccccaagagggagggaatgggagggagtgtgtgtgactggacgtttgggtcctagaaaaggaaggggctagggaagatattggggttcccgaaaagagaatcttagggtacaggccgttgagacctacaaggggcaggagagagcgagcgatagagggagggttcccgcctccctccccaggtggagactgagggtggggtttcccttcggtggctgtgggcgggcggctggaggcgggggccgggccgggggcgggggcgaggtgggggctctgggcgccagggtggccggggacacacagaagcggcagccaccgaggagggagcagtgccgggagccccgacggcgccttgctgcatggagctgggccgctgacagctgtcgctgcccgcagcctctgacctccctgggaccccggcgtctgaggctcatagtctgctccctgtcttctgtcagcctcagggcatccagcgtctcaggccgacctgggtccctgggacccggcgtttcggcttctcagccatggagcggtgcagccgctgccatcgcctcctcctcctcctacctctggtgctggggctgagcgcggccccaggctgggcaggtaagaggagtcctgatgcctgggtcctcggagtcaggctggagctctgagtgtctctgggaaggggccagctgatgcctggggcagcagcttctgagtctaacaaggagatttggggcttcaaggctacaggctggagggcaggacacctgtgttccttggcatcagggtaggaatctctttgtccttgaagtgactgggggagggcagatagggctgaaaggtggaggaccactttagagaccctgaatggggatggatgcttgtcttgagtccttgggaagagctgaagatggccagggccagcccggtccagtcattgctggtgtggggatggtagacgccaatgttgatgggtgaggcgtgtgtgtcttatggcctttctgtcgatatctctgggataaggggtgagcacctgtgattcagagcagagcccagtaagcccagaaagaaaggaagccttgactacctgtctcattggcctcctggacagggtccccctccccctccctgtgccctcgatgctgccacgcagctggctctggggagcactggggctggctgccaacaggacggccctccggacaggccaggatcaggtgtctgaggccagagccaactctttgcattcctgcctagcccctcctccctctggccagccaggctcccctgggaccctggtgcccacaaccctgatcttttccttctttttcccaggacccagaattcctggcttctaggaaaggggatttgatgtcaaggagggggctgtgagcaccaggtcctcagcaggctggaaaaagcccatttctggagacactgagggctgatttatatttaacttgactattcaattcttctctgctttagagagaaaatggtcagaatggcagcacaaaagatttagattagattacagaaggaagaacttccaagatgtgaggacagtgaagcccagggccaggaaattgaggcgtatggtgcctgtagactctaggagtctttcttagggggaagagggatcctctggcatggaggcagggggatggctaagatgactgtttcttatttcaggggctgagtgggtagagatgggactttagggaaatgagttactgtagaattcctaaggttagagaataaggcatttggggggccagaggtagagtggtggagggtaatggggctaccagtggagagcctgtggggcagatgaggctggatacaggggggcaagtatgtggcctggtgtgggaagatggtgggcggacctgtgggtaggttgtccatatgatcgaattgtactcccttgggatttggtggagggtggggacctccgaggtctccttggcctggggtctctgtgagtctctgtgtctctgtctcactcacccttcgtctctcaaagcggcccttgtgtgttggtgtttgcggagctgccacacgcgcaggggccaggcttaggtgggggttgggggggaaggccgtggtttcccggctcctggactcaaagggccttttctctgcctgcccgccccacctcacccaccccacccagctccactctcctgattgctctggcctctgccctgccccacacttctatgaaagttttgctggaactctctttgggatttttccaatctggagctgatggtgtgaagagtatgtgtataggggagcaagtgagggcaaggtgatcttttgttttccagggagtttgagccctaggaagctgagttctagttagacagggctggtgggctggatcttgaatctttgggtcccaggtggtggggttggtgggggtggtgagacaggattgaggttccaggtgtggggagcttgcctgggttctgggcaagcactctgatgggatccacagatgtgtggctcagggccctggacctgttccggctcctcgtggcagcttcagcccctgccccccattcctccacccctccccaactcatctcctaaaccaggaggcacagactcctgggagagctttcttgtatctttttcctcagcatgctcagggttgttcccaccccatcccccaaacctgggatctgtagctgcttgaagcccctctcatagagctgcttctctgatctcttcctcgtggcccccctgcacctcctgtgtccaggatgatcgattgcccagatgttgtttgtgctggagacgggacagatgccagagacccagagagtgagagatatggaaagagagtgagagcgagggagagaaaaagatggacagaatgtgagagaaatggaggaagacagaagagacagagacagaaagaccaacataaagagacagagagagtaagagagtgagagagacaggagacagatgaagagttgagagaagtattcagagagtacagagagagacagattcataagctaaaagacaaagagagagcgtaagagaggcagatgctaggagagacaggggcaggagtgtcatggggttgaatgccagctgatgctgccctgcctccaggtacctttgcatttcccatccattcaggtactgttcagaagcaagtgagggtgaggtgacctttcccttgcagggagtttgagccctggaaagctgagttctagatcccaaatgtcccctatttatgccctcctgagggcatgtcccttctcctgataatcatggactctcccaggtgcaccccctgtggatgtgctccgggccctgaggttcccctccctccctgatggtgtccggagagcgaaaggcatctgtccagctgatgtggcctaccgagtggcacgacctgcccagctcagtgcacccactcgccagcttttcccaggtatgggtgacatggtggggtaggcctggggggaggtaatgggatggggcctaggatcagacaccaggaggaaaggggttgtggcggctccctttgcctctcactctgtgtgtatctctctcggttactaggaggatttcccaaagatttctctctgctgactgttgtccggacccgccctggtctccaagctcccctcctgactctctacagtgcccagggtgtccgacagctgggcctggagctgggccgacctgtccgcttcctgtatgaagaccagactgggcggcctcaacctccctctcagccagtcttccgaggcctcagcctagcagatggcaagtaagtttgtttgctcctctggtctgcctggcccacactttcaggaggaagtgcccccaaacccctacactctaaactgtgaaacccttgagaccctttgggccacaccacacctacccactgcccaaacttcagtcacttctagtccagagtttgggctttagagtgtacagccttctctgcatgttgaactagcctgtaccttgggcaagttacttaaaatttttgagcctcagtttctacatctgtaaaatagacattaaatagaattggcacaaataagaaagtgacggcatggtgtctggtgcactgtaaacactcaataaatggtagccattgttattactgctcttatcaccattggcttcaactcttatcactgctctccaaccatgttgactcccctacttcagtcagccaagagttcacttgaacctcttccaccatttccaggtggcaccgtgtggctgtggctgtgaagggccagtctgtcaccctcattgttgactgcaagaagcgagtcacccggcctctcccccgaagtgctcgtccagtattggacacccatggagtgatcatctttggtgcccgtattctggatgaagaagtctttgaggtaaccagagcaatcagaggcaggattgacttctggtcccctatcttgtgcccactacccttctggccccagcatgtcatcttcctattccctaggccttcatttttttttcttatgaattttcatttctattttctatcttcagggctactgttctctgcaggagaactagatgcctacctatatggcaggactgtccacagccacttactctgtccttcagtcttcatcagttccctcatccatccatcctttcaacccctctctctcctcacccacccatcaattcactcactcctcagccaacctatgcacacatccaccacccactcccccatctatttactcatctatgcatcacacgcccacctagtcatgcatgaaggcttatatccacccacctgtcaatcctccccctgcttaaccactctccccttcaaaccacccatctatgcttccacccatctatcctcttcaactcctccatccagctattcactcacccacccaccctccccatctacccatgcacacaaggatgcatgcatccattcagccaccatctatccattatccttccaccaactcaaccactccctccttcaatatactcactcacccatctcctgacccacttacttcccatccgaccagtcattcacccacataagttcacccatctacctattcacccatttgcttccatctactctgtaacccctgttcatctgcccaccagtccaccctcccatacgtacatttattcattcactatttatcaatgctcccattcattaatgcatgtaagcccccagccacccatccactcatctatccattcatccatccctccattcacccatccctccattcaccctccaagccagtcaacattttctgaatacctgctggacaaggagaacaaagaagagaatataaagtctctatcacccccaagagctcccaggtgggctctggaaatgagacaacatccctaaattacggtgcaatggagagtatgctaagcaccatgtgtgggcaaaagtaaatgccattggaactcaggaatgggttctccccactccatttctagaggtccagagaattctcatcatcactgccattggaaggccaaggcatctaaagctgagccctgtctctggaagccactgtggaagggctcatgcattgccacaaagcgcagaggggaggcaaagaattctggaaggcctgggatctggtcctgattctgccactctgggtgaccttggggcagtcattgcctttttgggcttttctgaatggaacgtatctgaaaaatgggtagaaagaaagatccttgttctgccaactttcctggttgttatgaaggtcctatgagatcccttgaaaactgaaaagggctatgcatatggaggactgacagtgaccttctcccatcttagggttttacctaggattggcctcctatactctttctcccggatgataccctctgcctctctctgaatctctccgctccatctctctcatgtctttgcagggtgatgtccaggagctggccattgtcccaggggtccaggcagcctatgaatcatgtgaacagaaggagctggaatgcgaggggggccagagggaaagaccccaaaaccaacagcctcacagagcccagagatctccacagcagcaaccatcaagacttcacaggccacaaaatcaggaaccccagagccaggtgagggagctgggagaacccccaagtgcagcacaccccagagagggaagacacccaggcatctctcctccttagttgtcctccccaccctcatctccctattcccatcaccccctcctcctagtcctcattcatcagcctttttattttcatctaaaaataaaaagagttgttatgaagaatttgtggctgggagctgtgttccctgctctgcgtctcctcttccagtcttcctggaactgtgtccctgggttttcccttccttctttgaattaagagattgggagacagtgggagaggggtgagagctggggaggcaggtaggagaggggactgaagccaggagaaagcagtcgggatggtgagaccaaggaggaggaatgggaaggagtagggatggagggaatatcaaaggaggggtgggtctgcagaagtgtgggagtggggaacccagtctctggcccccacctacctggaggggcaggaaaaggggaggtagtagggggaagggaagggaagggaagggaagggagcctgggttggatggggtctggagagttagaatacagataggctctggggtcagtggtctaaagatcagagggtcaatctcttaatcatgtctgcttctgccccacatgtggaaccccttccctctgttccacctctccccacctccctcctgaccctcaacctctcctttcatcttcaactctctgtttcccaactccacacctcccccgtttcccaactcccacaccatctttatatctccctctcccgcccttcaccccacaccttccaattaccccatccccttcctgtctatgcccaccccccaatcccagcccactgagtctctctactatgactacgagcccccctattatgatgtgatgactacggggacaacccctgattatcaggtaaactcaagggaccccttcatttcttccctttctcccagcacccccagcaatcatctcctaggacaccttcctcccctcccccatgccgtggggagaggcacagtgtgtttagattatggggatttacttagttcctgccccctccctgtctctctgctgcagcgccctgggagcccccaccacaggcctcccccttcccctagggggcatcggacccctccctgaaagcctaccccacctgccaagaggtcaatgacctggcaggcgtccccctcaccaggccggaggccctctccaactgcaggctttgacccagcatgggagcagcctcccctttcccgatgcccagctcggagggcagcttcccccactgcctggccccgccccaggaccagaggcagcagttaccggcaggtagagccggggcatccagatctctgcccccaaacctctatgaccttggaggttcactctccccaaactatccccctccaaaggggctgcaagatctgagatttcccccatcccccagcacagacagaccctgccctcgggggacaggtgctgctttgcctcccttctgctaacctttctccttccttcccaccccgtgctactcttctccttctctccttggggtcaggaccccaccccaggtgaagaggaagaaatcctggagtcgagcctcttgccaccccttgaggaggtaactctatgccccaccctcaccccatctgggggcagtgggcacctgtgactcactcccctcagcccatgacgtcttgatggaccagcccctcctctggccggagggttcttcctcatttccatcgatggcctctgtctttgggtcactctagaactatgggcctgcttgactctctaagtccagcccgttcccttcagtatccaggcctccttccatgattctttgattcctgagtgacttcgtctccatgttggtgtctaatggtcttactttctatgtcctatttctgttcccgggagccactttctgtccagtgttgtcaccttttgtcttccctatctctttggtcattcctggactcctttgtctgtcattgtgtccatggactgtccactctgcatccagtcctctggccacccttcattttatccaccacttcttcccactggacccactttctggacatctctccccatttttggcctttgatggcccttccatttatatacaaccactcccatggctattcttgggagaaaaaatccagttctgattaaccttggaatcctttgggctagaagttgtcacaccctggggtccagggtaagcctcctctcagccctaacatccccatctacccctctccctccccatccctgggaaggagcagacagatctccaggtcccccccacagccgacaggttccaggcagaggaatatggggagggtggcacagacccccctgaagggccctacgattacacctatggctatggggatgattatcgtgaggagacagagcttggccctgccctctctgcggagacagcccactcaggagccgtaagtgaaaggagcttctctttcattcttgactaccagtgggagctacaagaattgcttcttgttggtttcgatccttggctgttggctgtgagctatttcccatctgtgacttgtcattttctgttcacatatgatgtatatgttgcttgaaaagattactacctgccttcctttgccaaatgtcttaccttgtgactcttgtggatacttctgaagctcagggcaattgggaattaaaaaaaaaaaatatgtagccacttcctgtctttcttgatcacttcctgtctaactgaagctggatttcataaagcttttggtcaataaactactaccttgtgtccattttcagtgtttctctatcatttcttcttggtgaaataattttttgttcatgtttctaccaaacgatctaacttcctatgtcacctttttttaacctacaggccacttattatctgtcccttcctgccttctccagctgtggcatccatcttggtaactgtgtcaggttggactgcaaaggatttattatttctgttctggctctagtttttcatgctatcttgtgacaatttcctttgacaataagccacttcctgtatgtctcaggtcatttaaatcataaagtttccattgtgggcctcgatatttctcatggctacttcctgtgtgtcctagccttgatgtttgtgttttctggaagaattacccttcactgtcatgattccctttgcaggagtcacattctacctgttttgtgcctttcttttctctctgggtcacggtagccatgttgttgttgaaggttcacttcctggatcctctttccttcactgcttcctgtctgttcagccacttcctgtttgtccagtttgttttctagccatgttggccatgtttaattttcttcggccctggcatcattcttgcttccaagtgtttgtcattttgttctgtgtcccttagttgttctcatatcttccagtattccctgtcagtgggactgcttcctgtctactccgctccgtcttctgcctgccttgcagttctggctgcctcctctaccctgctgccgcatcccatacctcccctctcttgcctcccttgagcttctactgcctttcctttatgctgctctctgggtatttggggttgatatgggatttcagagaattttgaaacggatcattgctgtttggtcagaatgaaggtggagaggggcattctgaagatctttgttggggggagttggggtggtggtgaatgtctcccattctccatgttcttattttgtttctggccctagagttgggaacaggtatctgagtggaggtgtgcaagggagggaactggtgggcttggaatgtacttgagggccagaggaagggcaatgcattcagtggggactgctctccaattttttttttttttgaggcagggtctcactctgtcacccaggttggagtgcagtggcaggatcttggcttactgcaacctctgcctcctgggttcaagcgatcctcctgcctcagcctcccgagtagctggggttacaggcatgtgccactgcgcccggctattttttgtatttttagtagagacggggtttcacatgttggccaggctggtctcaaactactgacctcaaataagctgcctgtttcggccccacaaagtgctgggattacaggcgtgcgccaccgtgcctggcctccaaatttacttagagtatggatgcttaacctttggggcatatttaaacttgtgaaccctttgaaatcctaaataaaattctgtgcataatagcatatactttttcatttctggagaaagactcacagctttcatcagattcttttttttctttgagatggagttttgctcttgttgcctaggctggagtacgatggcataatcttggttcacttcaacctccacctcctgggttcaagctattctcctgcttcagcctcccaagtagctgggattacaggcatgtgccaccacacccagctaattttgtatttttattagagacggggttgcaccatgttggtcaggctggtctcaaactcctgacctcaggtgatctgcctgcctccgcctcccaaagtgctgggattatgggcgtaagccacctcgcccggcctagcttttatcaggttctcatgtgggtccatgccctcctcttaccccaaataaaaatctacccacaatcttagagagattcttttatgatgtattggggtaaatgtgtggaaggtttcttaaggttctagggagggagtttgggagatgggatagggtcctctagaagagggtttgggaaggtgggtggtttaaaatccctgaaaggggccaggtgtggtggctcacgcctgtaattccagcactttaggaggccaaggcaggcggatcacctgaggtcaggactttgagaccagcctggccaacacggtgaaaccccatctctaataaaaatacaaaaattagccgggcatggtggtgcacatctgtaatcccagtgtaatcccagctacttgggaggctgaggcaggagaatcacttgaacctggaaggcagaggttgtagtgagccgagatcgcgccactatacttcagcctgggtgacagagcaagacttcgtctcaaaaaaaaagaaaaacaaacaaacaaacaaaaacactggaagtttctggggaccttcctgaaagaggctctcagggagatggagaggttgtgtttgctgaggtggggctgggaactgggggggcagggaaccctgaggtctccttggcaggcttgaaaggtttgtgaagagggagttttaggggagggctgtggggctttcgggtagggctgaagtggtctcgagaggatctaagaatcaaggttggagttgagatggagaaaggcctagtgtcctggctgctcacgggccccactgggggctacatgtgtgtctccttcaggctgcccatggaccccgagggctgaagggagagaaaggagagcctgcagtgttggaacctgtaagttatgctggtcacagggctgaggcagtggaaataggagaagcaagtggggttgagtgtgctggtcctgtcgcctctgatttttaacctttgactccacagggtatgctcgtggaggggccccctggcccagaaggccctgcggtaagtctagcagtgacctggtggccattcttttcttagaaaccccttctatgtgctcatctgagccttccccacatatgcccaggcctcctcctcagaactcgggagcatccctccaatcaacgcttcccagattcccagatctgttctgcacagaccactcctcagccacaggctgagtgtccacacctgtctgaatgcccacacctgacccctactcttttgttcctcagggattgattggtccccctggcatccaggggaacccaggcccagttggagaccctggagagagggtaagggggtgtcctccatgtgacgggggagcttcgggggagctagtggtatccaagcggggggctaccatgcccagtaatttcctgttaggtggcttgttaatgaatgaggggatggttgtgcttcccagcaaccagaaaggagggcagactctggttggggagggtgctgatctggtttctcaccctcaattttccccatgggggtgggagactcaggaaagagctagagcaatctacacttattctgttgaagaggatatttcaaaatcatgctaagatcttgatgtccccttatctttcaccccatcttttgcattctcttcccactccagggcccccctggccgagcagggctccctggatcagatggggctcctggtcctcctggcacatctctcatgctcccagtgagttgtctcttgggttttggaacatgctgatggggaagacaaggaattgtgtcatgttaccaagaaccagatgggcaggaaagatatggaggagtctctaaagatcatcaaagatcatcactccaaagggattcgtctttggggttggggagatggggcctcattaggtgacctagaacaaaacaccagtcttctaggactgggcagaacagcctatatttcaggagctctagaaccaaaagagagtctttctggaggcagaggctggacagtggaggagggcaggagttgagtttctggaatcctctaagtgattatctggaagccatgggaaatgctggatgggcagaacctggggcaaggggcagaaacgctggagaaagcctctggctgggagggtcccatggctttcttggaagagaacctggaccttctctccttgccctcagttccggtttggcagtggtgggggtgacaagggccctgtggtggcggcccaggaggctcaggcccaggcgatcctgcagcaggcgagggtgagtggggctgcttccctggaaagggaaggctctggggggcactggaagggttggctggagtgagtgtgcggcaggggaggcctgggttggtttggggttaacagggaggttggggagaatcctgggcagtggatgaggatcaggagaggaagggtgaatttggagagtgctggggctgggggttcccactgcctgtccctcagctctgctgtccccctgctcccctagctggcgctccgtggaccccctggccccatgggatacacagggcgccctggacccttggtgagtgagcagggtgctcgggtggaggatgctttaattgtgtgtggggtgtggatagttctggaaaggggcttcttttggggaacactccgaggccactgttggctgtgtccttccttacggccatcctctcttctctctcccagggccaacctgggagccctggcctgaaaggagagtctggagacttaggacctcaggtgaccactttcctccactgcacccccatatctgttcaccagctcagtctccctcactcccctccctatgcctcctaaccccaccccatctctcctctcaccagggccccagaggacctcagggcctcacaggccctcctggcaaggctgggcgaagggtgagtgccccaggggtggatgggtgttgtggggagacagggcctgcagggtaggggactgcggccctgcttgttctgacacttcccttgttctcccagggccgggcaggtgctgatggagcccgagggatgcctggagatcctggagtgaaggtaacaggcttgggcccctccctgaagcctgtagccttcagcccacgctgggctcagttgtttcttggggatgacctagttctccaggcttccccaggatcagcacccccccagctcagggtgcagtagggaggggtgggcttggacagggtcgtgtcctcactctggctatccttcctcctcctagggtgaccgaggttttgatggactcccagggctccctggagagaagggccatagggtgagtacattagtgggtgtgtgttgtaattggggatagatcttctatgggagtgaggataggtagggaagggaggctggaggcttggcaggagctcagtgaaagtaatggatgggctaagtgcagaggttcggtgtctgcctgtgttgggggctctgaagcccctcttatgagttcccccattttgcagggtgatactggtgcccagggccttcctggtccccctggtgaggatggagagagggtaagtgtagtggcaaatgtaggggctgggtgcaggggaggtctagaaggcacagcagctttaccgtgtcctcctcctccagggagatgacggggagattgggcctcgagggctgcctggagagtcggtgagtgtccaagggctggtgctgggggagggggctctggggaagccaggagggggacatgagcactaaagggacacagttttatccattcatgccgtctcctcccctcaccgtgaatgcagggacctcgaggtctccttggccccaaaggcccacctggtattcctggaccccctgtaagtgactccctgacttctgaccctgaggtgaccccttgacctctccaactctccacctttctagctgccttcctgctccctctcctctctcggcatgcttcccattccctgtgagctccccctgctctggccccacactgccctgcctcagcattcgctccccgtgcacagggagggccatgtggcgtggtgccctgagggctctgggcataggaaataaatcttcaagaaaaacaaaaccaaagcccacaagcccacagatccacagtcccacacactgcaggcctgggccagctgtgtttgcttgggtttgggatggattggaggtctgaccgtcacaccctcgggaatggccgggcctctgaaaaccacaggtccctccgggccaccttcaggctgctcacacccatcttgtgtttcagggcgtccgaggcatggatggtccccagggccccaaagggagcttggtgagtgatggataggagatcccacccccattcttatcccccgaggtccctgccagcatcctgttggccgccattttgacccctgcctgcttcctgctcttgccttcttggctatcgctgctgggactcagctccatgctctaaatgtgttctatctccatctccttctgacctgtgcctggtcacctgtttctagggaccccagggagagccaggacctcctggacaacagggcacccctgggacccaggtgagcggtgcccctactccgttccccaattttcatgacttcccttgggcttccacaatgggtgagaccctggaaggatacaggaaattaagggtttcaggcccttgttgctcatgctttgaatccgggaggctggatagaagagaccctgggaggcccctgtgacttctctttccctgtatgtagggtcttcccgggccccagggtgccatcggccctcatggagagaaggtaagtgactaagtgatttggaggacagggggtttagagtggggatgtagggagaaccctaaatgtctgctgggattttgtctgtgtccagacatgacccctctagtgaccctgagcctctttgtcttcctgcagggtcctcaagggaagccagggctccccggcatgcctggctcagacggacccccggtgagtgggaccccacttccgaatccagttccccttggccttccaccccagtgcatgacctcagagctcctttagtgacccttgcactgaaaggtcactggtggtgcttgtccatggacagttggcttcactaggtcacaggaaatttgggttggaagaagtgtagggaggggtgcagagagggtgacaggggccactggtcacattttctatcccttactcccagggtcacccagggaaggaaggtccccctggaaccaaaggaaaccaggtgagatcttccatgtctttatcccctgagggagtctccactcagactctagagcctcaaagtccttgggattcccttgtctcattattcatatggctctgccacattctcaattcctgtgccccgtaaccctacccagacagcaatgttgttacttccatttcttccacccctggaggcccccacagtgacactctgaggcccctttataaatgcctctcttttatcttccagggtccctctggacctcagggacctctaggatacccaggacctcgaggggtcaaggtaactgaccaccaggctgggagacaaagggctgtggtcaggggagctatatggggtcttaggagcttggtccttccaacccacctccatcccctgatcagtctacttctatcccctctctaattctagggtgtggacggaattcggggtctgaagggtcataagggtgagaaggtgagcaccatgcccccagcttcccagcacctcagtcctgccatctcctctcttcactgccttccctccagcctgccccgcactgccgtccagctcccgagcccctgcttccacctatgttctcagaattcccattagaaccccagccctctgtcatctgtggtgccctctcacctctatctttctcagggtgaggatggctttcctgggttcaaaggtgacataggcgtgaaaggtgacagggtgagtagagaccccacactggccccaattccgtgttctactgagcctccactctggagacgccaagcaccggtttattctcctgagtctccagactccacagttccagtgctgtgttcccttgggagcctgacccctacaggatgatagccccatggtctgtgtcatgcctgccctcccatcactacactatccctaccctgtgggcttcctgtcctgcagtggctcctgggacccctctagccctcctcagcctcactgttgcccatttctcctctgggcccagagcccacctccagtccccagcactcacctgtccttccctctcacacagggcgaagttggagtccctggttccaggggagaggatggtcctgaggggccaaagggacgcactggaccgactggagaccctgggcccccagggctcatgggcgagaaggtgatgggatgagggttctgtgcctgggtcctctgggggtgtgggcactggggtcaggatgggcatgggtgcccgccgctgaagtcagccagtcagttgaagatggccatgcattagtcatacttctgtctgtgtaaatggcatctctcagctgctgatgggcagaggggatatataagaagtcagggaaaagtccctgacacgaagagttggacggagacgaagcttagagagtagctgttgcttcaaggcagagtgaacatgcgttcggactccaagcagcaggagttctgagatgagagagtctaatagcagtgaggtctgtggtctccagagctgactctccccagcacttgccctgtgccaggtgctgtgctgatgcgtcctatctatcctatgaggtaggcatgtgacgtactgttttgctgaggttttacagaggcacagggatgcttgttgattacatggccagtgaagggcagagccaggggttatgcccaggcagtctggcttcagaatctctgcttctaagccctgctctgcagctgcctgggcaggatgagccctggagcctctggggaagggggcatgcacgggagtcggggtgtggtgggcaaagggcctgcagggggattggtcttggtgaagcaggagtgggtgctggggtagatcccacctccctcatggggtagatggagctgaggttgacatgtgggaagcagctagatcacagtgaccctgaaggacctgatacctctgtaggcgcaggggaggtgggatcccagcactagaattggggaaaatccactcacgggaaggagagacaacaaaagtcaggcagctgtggggcaagcaatgaggggctagaggctggggtgtgtggggtgtgttgctgggtgggggctggctgttatatgtgagggttgaggtctccaggggtggagtggcatctgggcctcctctcactcctaactgcttcctgtccctccacagggcaagctgggtgttcctggtctgcctggctatcctggacgtcagggacccaaggtgatgccatgccccatacgtgcccctcctcctcttccctcctcctcttcgcttccctgatccctgattccagaaagcacagatgcagggcagtgggggaccccagagggaatttagctgacccccattttacagatgaccgaaagaggcccagagagcagcaggggtttgtccaaggccacttagttcttggcagagctcgggtctccctggccactgcctttgtggcctctcctgaccccctttgccccttcctgaaccctacctttcataacttctcaatttccccccttctccgttctcaccaggggtccctaggatttcctggctttcctggtgccagtggagagaagggagcccgggtaagctggggggtgggagggcgtgagaagggaagggctggagaggtgtagagggggtctgtggggagtctcaccctgggtaatgttctctctgcttcattcccaccagggcctgtcggggaagtcagggcctcggggagaacggggccccacggtgagtgcaggggagagaaacaggtggctcaaggtccagaggggggcatttgggtttctctgacaactcctcttccctctgtagggtccacggggtcagcggggaccccgaggtgccactgggaagtctggagctaaggtgaatggtctctacaaggctccaactgccccctgcccactcagccccagctctccctcaacatcctgacctcggggacagctggaaagcagctcttcccactccttgactctgtttccccccacagggaacatctggtggtgatggcccccatgggccccctggagagagggtgagtgtggatcgaaagtccccttcccctgaggtccccagggagcctgggtgagccagctccctcctcaccccaggaaggaagctgagttcccccactcagcccctgcccccattctcctgactccccccacctctgtctctagggcctccctggacctcagggtcccaacgggtttcctggaccgaaaggacccccggtaagttgaccccgagctctgacccacctcgcttctctgagtccttcttccctacctgctttccagctgagagttcacctgacaactgaaccccttccagggcccccctgggaaggatgggctgccgggacacccaggccaaagaggagaagtggtgagtgatgctcctggctacccattctcagggggctccatcagaccctttaaccccagagctgtctggaaagcccacagggacgttctcctggcagagtggagcctgccctggtgctgctcagacccagggcccagggcttggtgtgatcctgcctgggatccttcctcctgggaatctgccccacagcgcccacacctgctttcactgcattctcctctcttcctcgcctagggtttccaagggaagaccggcccccctggtcctccaggagtggtgggacctcaggtaggtttgtccctaggagagaatggacccctgaccctagcattagtctgtctgcccctcttctctcggtcacacgcccctgccccggtccacctgacccagactcctggggctggggtcaatggtgggggctgggatttcaggcaggggtcctgaacttcagtctgttttggggcgcattctcatcgtcttgtcccccaggagaggcagttccccaacagagacacaaggtggtgtagttactccacatggggcaggagaaaacccagcagtggcccaggaatgccggggaatttcccaggagctttggggcagggataaaggggttctgaaggagtgttttagggtggccagggtgggctcttctggcagacagcgagatgaagggcctgagagcaggaactctctctgcttttgtctagggagcagcaggagaaaccggccctatgggggagagaggtcacccaggccccccggggccccctggagagcagggactacctgggacagctggaaaagaaggaacaaaggtcagtgaggggccaggcagaggggaagtgggggagctggggattggggtgctgaaaggaacaggtagttggagatttgagggggggctggagagctctctgtttaatttgggagcatggctgtggctcatcacctctcctttccttttagggtgaccctggtccccctggggccccagggaaggatggtcctgctggtctgaggggattcccaggagagagaggcctcccaggcactgctgtgagtgtgactcccagacccctgcctgtcacaagcaccaagcatcctgagtccccaccccgaccctgtccctgaccccctccatgtcactccccacttccatcttttggagcctgtcttccctctccagctctcacccttctcttttcgtgaagtctcatcttccccaaatgtctggttcatagggtggacctggtttgaaggggaatgaaggtccgtctggcccccctggccctgcagtgagtctggggttccggaagtggtaggaaggacccgggaaaggggtgggtgaggaagggtgggagtggcattctgataccaccaggggctgtggggctgggcagaggctgtccagggacagccagaatgcatctgattttgggagcttttgggaattgtggtctgaggttctctggtatgggcgggctggtgtctccttcctgggggtctgaccatctgctttctcagggctcccctggggaacgaggtgcagcaggatcagggggacccattggtccgccagggcgcccaggcccgcagggtccccctggagcagcaggagagaaaggtgtcccagtgagtgtgggggtattggggaggggtactggggaggggtctgtgagcctagggttgatgggctatgacaagtttcctgtggggtgtttgagggtgagggtcacctccaggccatgactccttcctcctgtcccacagggtgagaagggccccattggcccgactggccgagatggagtgcagggtcctgtggggcttcctggtcctgctgggcctccaggtgtggctggagaggatggagacaaggtgaggggaccccacagaccccgaccaatcttctttccagatgagatggctgacctgggcatgacccctggcccctgtcatgtcatccttcccactctacccatcacctttctctaatatcttgtctgccttctcctcccagggtgaggtgggggaccccggacagaagggcaccaaagggaacaagggtgaacatgtaagtgtccatgaccttgacttctgacctcctggcctttaacctcagtcccacctgatctctctccctgttttggtgtctctgactctcttctcttacccagggccctcctggaccccctggacccattggtcctgtggggcagcctggagcagcggtgagtgacccctccacccccaccgaaggcccagcagcctctggtcctccctcagctcccctctgcccttgtggctgggagtgggagcaggggctctgggcctggcacccagctgtgtgtggtatttgtggatagagaacacctgacccatgacccatccctgtgtccttgtctctgctttccctcaaccctgcagggagcagatggggagcccggagctcggggaccccagggacactttggagccaaaggtgatgaaggaacaagaggattcaatgggcccccaggacccattggcctacaggtgtgttgggggataggacaggggctgagaggtggggtcaggatggggtgatgttttgccccagactctgccagcagcctgccgatgcagactggagggcctgcggagtctgaggggaggggactgtggggcctatctgcctagggctgtgctttgggtggggtcgtcacctgggcccatgttttgtatacttgcacagggtttgccaggcccctctggggagaagggagaaacaggagatgtgggtcctatggtgagtgtgacccctactgaccctagccaccatactagtcacccccctccctggccagcccccaccccacaccccactgccaactccctggcctggctgctcctcctcctctctccaccattcatgctcagccatctcacttcccttcctcatctgtggtgtatctgtttcccccagggaccacctggccccccaggacctcgaggtccagctggacccaatggcgctgatgtgagtcatctcagcccctgtcccttgagaccaatgtgtctggtcttctgcctccctttcccagaccataaactctagtatcgtctcaggggccaagagaagcccttactcccgggaggcctccactgcctcactgctgtaaccttgggctgctcatctgggactttgcccctgaaatggcacctccatcctaagcaatgacacctatttctgttcctcttccagggcccacaaggtcccccaggaggtgttgggaacctgggtccccctggagagaaggtaactgggaagggggtgagtggaccagtcatggaagtgggggatgggagttggatttctgccaattttgggtggggagacaaaagagaatgagatgtggggaatatcagaattttttggctggggaaggagaggaggtttttgactctaatctctttgcagggggaaccaggagagtcaggatctccagggatccagggcgagccaggtgtcaaggtgagtgacagctccaaggccttactccccagtccccgtcacccgcctcaaccctgcctccacttttcctgtgacctccttgagctggaactcctctgcagcaagagtctctgctccctgccatcctctatgaggcctgatccctggtctgagtgagcccttcttcccctttcttgaagggaaggggactagggaactccccttgtaggcttgactttctgtgtatgtcccattgtcactgaggggagtaggggatggctgaaggtgtctcggaagcagaggctgcatccctgatcttcaagattccctgggccatctgtgtcctccgcttgttctgcagggtccacgcggggaacgtggagagaaaggagagtcggggcagccaggagagccagggccaccagggcctaaaggccccacaggcgatgatggccccaaagggaaccctgtgagtttggggcagtgggggctgagtcctctcaggccctgtgaatgacagacctgggaatatgggtgtgtgtgagggaggatcttggagtgtggggagcccgggagtttgggggatgctctgggaatggggcatccagagggatgcctggggtctaggatccggagagaaagtgagagatgccctgcagttaataccttgaggaattagacaacacgcagtgcacgtggtagggaaaggggtgcaggagacctcttcctggggggtactggtgggcactgcctctagagaggcagtggcgtgtgcctgtgggcgtctgtgctgggtgggcttagggagctgtgaccctgactcttattctccatctggatcagggtcctgttggttttcctggtgaccctggcccccctggagaaggtggccctcgggtgagtcttactcagagaagggaaggggcaaaaagggtggggcttctatgggggggtcctctgtgtggccgctgggcttgggtattgggaagccgggggtatggcagggtgggcaaggggatggggtattgacagttttggaggtgatgccagccaggttgggggcccacctctgaccttgcttcacttctgcagggccaggatggtgctaagggtgaccgaggcgaggatggtgagccaggacagcctgtgagtgcctggtgaccccaccacccccctgagcccaagcctcatcctctttacccctcttctgtgccccactcctgaggggtcccttggctggaggataaacactcagccaccccaattcctctctccctagggatcccctggtcccaccggggagaatggacccccagggccacttggaaagcgagtaagtgaggtggacccctgagaccttgggaggcagtccctgggctgtgtgggtggaggctgggcaatggcaggtgggatgggtggggaggtgcctggtgtctgcattgccctgggtgtgtgtgtgtgcaggagctggtgggtttaagggcgtgtggtatctcattgcccggggcagggtgtgtgtgcaggagctggtgggtttaagggtatgcggtatctcattgcactgggcgagtgtgtgtgcaggagctggtgggttgatgggtgtgcggtatctcgggcatgtttgttcctgggttctggtgtgtatgttttcaccaggggtagtggtggttactgacaaagcagaatggaaactggaggaggggctggccagcttttctgtgggccaggggtgaacctttttagtttctggggcaggagacgggccaccaggtagggtgtgggcaagtggcccttcaccaaatgtacagactacccagtattttcacaactgtcacagctgtatctgttctgcacatctgtgaatcggccctcggcgcgtgtccctgtgtatgcacgtgtgtgtgtgcatgtgtatgtgtgtgtctaggacaggaagggggaagagttgagcctggctgcccacggcctcatgtgctcttccttcccactccacctgcagggtcctgctggctcgcctggttccgaggggcgacaaggagggaagggagccaaggtgagggacaggctgccctagtgctggagcatcccctccgcctcccacccctcagatgcctccgtctccagatgcccaccccatctccacctctcccatgttgggcccttatggggacaggcgttccctgtacttgttcctgcgctaggggctcctagagtttggcccttcctccctgcctcctgcctcccaccttggaccctctgccccctgcccacaccccactcctctgccattcaggacacattccttgtgtgtgtttcagggagatcctggcgctataggtgccccggggaagacaggcccggtgggtcctgcaggcccagcagggaaacctggccctgatggtctgagggggctcccaggctcagtggtgagtcactgcagggaagggctgggctggggtgggagtgaggggccatgggaggggtgcagtgtggggatgctcctcctgacccctgtggccccctcaaatcttcagggtcagcaaggccgacctggagctacaggccaggctgggcccccaggtcctgtggtgagtgactgggattgggctgagtgaggggtgagggcagtgccctgggacagagctgaagccctggaggaagtggaggctgttggggagaacttggtcccacctctcccttaagagaatgacttcccatctctccacagggacccccagggctgcctggtctccggggcgatgctggagccaagggagagaaggtgagtgacagacagacacgtggccaggtgtctctcccatcaccctcgcccctgaaacctgtgggacccaagtgcccactgctctgcttcaggcctccggcagccagtcccagggagtccctgctcagtgagggccactcacggaccctgtgcccggctccctctccatgtcctcttggcccttctcccccatccacatgactcctctttgcattctcttgactgcctgcacccttctctagggccacccaggtctcattggactgattgggcccccgggtgagcagggagagaagggagatcggggacttcctgggcctcagggctcccctgggcagaagggtgagatggtgagtagagggcatggtcccggaagttgtgggggttgagagtggggtggagaggggtggagttggagttgggactcagctgtgggtaagcgagcaggtgctcaggagggtgtgggaggaggacccagttgaaccagccactacccttcctagggtatcccaggagcatccggccccattggtcctggaggtccccccggcctccccgtgagtactgcctctgttcctccacaaaatcccctaaacccctctgctgcccacccacagcctcccaacgacttccatggaactaccagcctaacaagcatagtcctcagggtcccccatttgtcctgtcaccaccagtacctcctccccatacttccagggctctgaatgtcctagtattcccacaagactgcccctcctgtagtaacccgaggctcctgtggacttgggaccttgcctccccgctcctctgagtcctgtccttcccctgcagtgaccgtctctttcttgttcctcatttcacagggacctgctggccccaaaggagccaaaggagccacagtgagtgacccccttcagctctgacctttgctccaccccctctggacttgatgatgtctctccaggacaaatagactccccccaaggagccccttattccagccaggaggctgatttgatctttctgtgaccttgatccatgcttgacctcttgacccctccatgacctgatttattccttgtcagggcccaggcggacccaagggagagaagggtgtgcagggccctccaggacacccggtgagtgaggagtcagggctgctcccagggccgtacccctctgctccactgctgccacacttcaccctcacaccaaccttgtctcttgccctctccatctgtccctgcacccagggtcccccaggcgaggtgatccagccactgcccattcagatgcccaagaagactcggcgctcggtggatggaagccgtctgatgcaggaagatgaggccataccgaccgggggagcccccggcagtcctggggggctggaggagatctttggctcactcgactccctgcgggaggagatcgagcagatgaggcggccaacagggacccaggacagccctgctcgcacctgccaggacctgaagctgtgccacccagagcttcccgatggtcagtgctagcctcagggtgcacaaacatctccccaacagcatgggtactgaacaagcagaatggatgctgggggagtcttggtgaaggtgttgggttaagggtgagggctgaggggctgggaactgcagctatttactaaccaggtcagaagtatcccaatactttagcaactgatctgggtcagtgtgtaccagttggttatcagcccagtgtctgcaggagcagataaacatacatacgtgcacacacctgtttgcacctgaacagatgaatctgtgtgagcgcctgcaaccacatgttgtcccagtatgaggctgtccatactcggacctcctccagtcagagggcctggggttactgttgggggcagaggtgtcacgtgatgaaagtgggctgcagcagtaggatgctgcagtagaatccagcagtagggctagattctagggctctgggagggaggaggaccaggagactaagagcatgatggggagggctgggagggaagagggaatgtgggggcaaagagcatcttggagcctggacctaggtggccctgacctcccctctccctcacccaacaggagagtactgggtcgaccccaaccagggctgtgctcgggatgccttccgagttttctgcaacttcacagcagggggtgagacctgtgtgacgcctagggatgacgtcacgcaggtgagagctggcccctcgctgcccctcccctgccccatagtgcaccccctcagggcttagtggtttctgggttttggtgacagtcccctggctgttgccccccccggagcctgccaccccttctccacttcttagctctttcttcttttccttttcaccggtcctctgatgctcactttgcctttcgtgtacccccagtctcctggctcccactcagcccctcacttctttcccagcccttgccttccagccattccctgctcatgactctggctcagctgtcctggtgccgtagatgctcctgaggcccgtctctgtctccctctgaggccagccctctctctccccctctgaggccagccctctctctccttccagttctcttacgtggactcagagggctccccagtgggtgtggtccagctcaccttcctgcggctgctcagcgtctcagcccaccaggacgtctcctacccctgctctggagcagcccgtgacggtcccctgagactccgtggggccaatgaggatgagctgagcccggagactagcccctatgtcaaagaattcagagatggctgccaggtgggaacaggaagagctgggttgggggctgatctcagactcaggctggaggaaggaggtgggaagaccccttgggcagggcacccagggggagcagggaggagtccgtcctgctggattgtcagggatgcctgagggagctcaaaagccggtgaggaaggtggaaaggatggaagccatcgggtgaggttcacttgggtacaaacaccagcgtcacacaggttaatgcagacgtgtacacagactggcacatggctgcccagcagaggcacacggtgggggagaagcaaacacacacgcatgggcacatagacactgccagtctgtacatcctgagtcaccctgatggggccaaggtgctcagaggagaggtgagcctgggcctgaggttagagggtggggggtgcctccatcctgctcacactttcttccttgtctccccctgaagacacagcaaggccggacggtgctggaggtgcgaacgcctgtgctggagcagctgccagtgctggatgcctccttctcagacctgggagccccaccgaggcggggaggggtgctgctggggcctgtctgcttcatgggataggaccgtctctgtctgatcctgtccattcggaaccaggcccacctggaatcccacaacatcagctctgtgccacctcccaagagggctcctcactatctagggagccctgggccagggcgtggagagccctcagtcggggcaggccaggggaggggtgaagtggttgcctggacaccccacgggaggagtggcatctggggctcttggccctcccacctggagcctgttacccgttagagagctgagacccttatttaaaactcacctcccaatcaccccaaacaaatggaagagaagagaaaggacatggcgtattttgtatttaaaagtaattgtattaattatttaaagtgtggaaagcaaaataacaaaaaagagaaacgccaacaaaaatcagcagatgttgaagacaggggtctcgggggtgggctccggcacccacatcctggagtcaggactttcctcagtgactgtgtgtaggggggtttcagggctgaaccccacctccctcccaccttcctcccacctcacctgtcgcacccactgtgaaagttggaatatgtggtctccctggcctcagggctctgactctgccagggtggggctctctaacccacaggtgttggctgcctggcccatgtgcccactgtctcttccacttggtctgggtttggcaggcactgcctgctacttgagggccaggatgctcccccagggaagaaacggaatagtgtggggtgtgtgcagggctgcatcccgcagatggctggaatattaaaattcttctatattggctggtaaattgccatggccctgagccactgagtatgttcattgccacccctgtccctcccctgggcacccctcactttccctgatcctgcaattaaagggttaatgtgtggcatatggaagggactcccaggaccctgtgcccagcttccatgctgactgatggttaaataatgtgattgtctcctcccaggtgtctgtgtcactgcttgtgttgttatttcagtctcccccgacacccatctgatgcttcctcttcccagctaagtggttaccagaattgtatggcttaatccagataccctgcaagccctgtccagctggggtgtcagggcccagagtttacaaagcctgggtgactagcataaaattacaaacaatgccccagggacaccaggtaggggtttggggtccctatggctccagtttctgacacgggtgtgcgattgcttctgggtgtgggtgggacggtgctacatagcccagtctaatctctgtaaatggggaggctgaggcccacttccaagacatttactgcatctgtacctctggtcaccttatccctccccatcagccttgtgctgtgctgtcatgaagacagggctgtggccaagccctccacactcacgtgtagtcacgtgcatactcgttgagtctttgtgttgggtggagtcgcacagtccctgcctgtgtccccccactcttgactgtcccccacttccctagcctccctctcctgggcactcagaagctctgctccctccgggttaggtgtccaagaagtcctctcttccaaggctggccgcgcagccgggaccccctagctggtgcccatggggcttcacattcccaagcagtattgcctggctcctgcctgtcagggcgctgcattaaaacgtgttccagggcctcatcccaatttcctcttcctcaaccctcttcctcgcgggcgccagaatcaagagtgcgtgcctttgtgtcccggtttcgcatccgcggcctcggggcgggcctggcagggctgcccttcaccccgagcccgagcccgggtaggctgcgcccccgcccctcctccccgtacttcttcctcccagcgtgtccccgacagcatcggcttggccgtcccggtcccaacccattctcgatcgcaggaagccccacgtgggcgtctagacggccactctggcccgggcgggtgcgcggaaaaacttctcgagggtggaagcctctcctcggcgctggcgcctccgcctctgccgccccctagtgcccgcgctgagaacgcggccccgcaccgggtcagctgaataatcccggtccctcagacgcctctcccttgtcacccgctgaaccccctgaccccgaaggccgaatggaggaagaagcccctgatctcatctgtcaggggtccggtggtggataggttttctgggatcacccatgctctccatctcaatatccaaggcccaggggcttcagacacccccttccctccctctcagggtcacattaagagaagatcagatctaaataggtgccccccatctgtttctcccgcacccactcccagcctagccgggctggagttgagatttctttggcgctctttctgcagctggagccaaacccgcagaggtcgccccccgaacagcaagaggactttcccaaaggtcacgtttggtcagatgctctgagttccgagggcttttctgcatggaaacaatgctgtacagtcactcgaataacatttatatacggcggctaagtccccaggccaatccacaaaagcctatttaattacacagtgctgccaaccaaccccatctaacagtttcacgagggagtctgtgccaagttgctgttgaggaggccaggcccacagccttctcttggcagctaacttcttcctcccctccagaaagctagagccaggctctaaggaagggtgggaggggtttaagggcagggctgtagaggcggggttttggggtggggctgggtgtgaacagggcaagtgcccaggcctctgggcctgtgggtagtggcagtgtctccattggctggtgggcaatggaggcttctgggtggggtgggaggagatagggaagagaaaggcagaggctttagggaactactttgggtttgattggggcagaacataaactcttgttggaggggccaaattctgaaaagtattgactgcttatggaaggagttgaacttgaacccaaaaactaagagtcatagatggtgtttgaaaaggcaagtgatatgatggaattgtgcgctggcatggtggcgaaggagaggagggtttgggatggggcgcacagggagatcatgtttttttttgttttttgagacagagtctcgctctgtcgcccaggctggagtacagtggcgccatctcggctcactgcagcccctgcctcccaggttcaagcaattctcctgcctcagcctcccggatagctgggactacaggtgtgcactgccacgcctggctaatttttgtatttttaatagagacggggtttcctcacgttggccagtatggtcttgatctcttgacctcatgatcctcccgcctcggtctcccaactgctggggttacaggcgtgagccaccgcgtgggagatcatgtatagagggagggctgtggggtgggtcctctggcctgtcacacccttggagctgcttttcagctttgggcttatatttttagcatctgtaacttatggttaaaaaataacttgtgaaataaaataaaaataacttacagaccacttatatcactgtacctgggagcaccacatatcctagaaggccatgggctacacagagctgttcttgccctcccttggctgtcttgcatgctgaggtttgtagttttgaatggaccagggcaggtgggggtggagatgagacagaggagggagtgagtcaaaacaaggctctcagcctgggcaacaaagcaaaactccttctctctctctctttctctctttctttgagacagggtctctgtcactcaggctggagtggagtggcaagatcaaggttcactgcagcctcgacctccgtgggttccagccatcctcccacctcagcctcccgagtagctgggtctccaggcatgtaccactagtttttgtattttttgtagagatgggattttgccctgtttcccaggctggtctagaactcctgggctcaagagatctgcccatctcggcctcccaaagtgctgagattacaggtatgagccatcacgcacggccctttttctctacaaaaaaataatttaaaaattagctgggcatggtggcatgtgcctgtagttgcagctactcaggagactcaggcaggaggttcacttgagcccaggagtttgaggttgcagtgagctatgctcttgccactgcactccagcctgggtgacagagagataccccatcacaaacagacaaacaaacaaacaaagggctccagctgcctcagaaataagtttctgtgtagtagctggtggccaccttgttttgtggttgtttagcccattttcctgcaagtgtggtgtggtcagcagggagcatcagggccacactggagcttctttctgtcgagctgtgcagttcacagactgtacatgtgtaggccatagctatgtttctcaactcaaacctagagtaagcagaagtcaccttaagtgcttataactggccttctgttatcttttctttcatcttcagagtagtttcatgggaactggcactgacagcagactgccatctcagtagggaagacctgtcctgctagtccttgaataaagaccaaggatatctacatgggcttctcctttagggctctccccacacggccaggatggtagaatgaacacagctctcagcttcagcgagagccagcatatcaccctgtctggctttccctcagttggcaggagcaggtcaatccattttgtgtacttcgctctggcctctctttttttgtttgttttttgtttttgagatagggtctcactccccttgcctaggctagcatgcagtggtgcaatcatggctcactataggcttgacttcttatgctcaggtgattcttccccctcagcctcctgagtagctgggactacaggcgagtgccaccatgcccagctaattttttgtatttttagtagagacgtggtttctccatgttgccgaggctggtctcaaactcctgggctcaagagatccccctgcctcagcctcctaaagtgctgggattatctggcctctcttttttttttttgagatggagtctcgctgtgtcgcccaggctggagtgcagtggcacaatctcggctcactgcaacctccgcctcccgggttcaagcgattctcctgcctcagattcctgagaagctgggactacaggtgcccgccaccacgcccggctatttttttttatttttagtagagacggggtttcaccgtgttagccaggatggtttcgatctcctgacctcgtgatccacccgcctcggcctcccaaagtgctgggattacaggcgtaagccaccgcgcctggcctatctggcctctctttctattaaaaacgccttactctaggttgaaggacttttggttcctgaggcatggatgatttcccaaagtacaacagataaaagccacactggctgtacagcagctcatgtaaaggtcatgttccaggtcttggccacttcacctataacaggcttggactccggcagagcctcaggccaaagaatgtgggtcatagagatatcttcctcattgtgttcacatctcccccgggcctgggctatattgttgggtcaggtaatcggcctgctctcctcatgaaataaggcatactggtattactaatgctgggagagatttcttataattccatcccttcccagttgtggttatttgtattaatacctgcaggttttccttacttttagaactgcaaatctatagaaacaaacaaaccccaaacccaacaaacatgtttcagagacattagggttagggagaagatgagaaatagcaccctgtttgattggggccctggggagagagggactcagacaaaagagtttgagtggcaggtggtctagttttgggtgggttgagcagacttagggccaaaggtggcactgattctagctggcagcgggcctctctgtatttccaactgagagttctccttcccttagcttgtcagggatgctttgcttctgagttgcacacttaacctcagcatcagtttcttcacctgcaaagtgggataatacttgctctgtaaaggaataattccccctttactgacagcctttgcaatggaaagtgaggggagggacctgacaagctgtcttggttccatctccatgtcttggttattgctgacacacgggtgtctggggcatgctgctgtcccttttccacttttgattttagtgctgttaaaactctatacttactattattattttcttgttacaaatcgcaaaatctgattcagaatagcttaagctccaaaaggaattgattgtaaaaatattgggtttctcaggatttgaagacagagttgactcaatagggaagactgagagcagttctgggaacctcaggggctcatggactttgtccctggagtgtggatactcaccgctcagcagagctgctcttgacctctgtgtctctgggccccatggttcaaagtcatggagagacaatctgattggcttagcttgggttatctctgtccctgagaaccaattttctgtggctgagggcccagtgtaccaaccaagaggtatgtaggatgccttttggtggaggtggaggggtgttgggggcactgtttccagataatgtgggatcctgaggcccccaggaggtgtccgcttgctttcccttcttcgcttctgtctaaacagactcctttgtatgcatttgaccagcgtgatacaaccagccccttcatgatcacatttgctctccctgccacccaatctcctggatgggcaacccaaagtcacattcagcagctgtggccatgacctctctaacctcagaggccgacatctctgccagttcatattttgccactttgtgattcagcacataaactttcatggccgttatatccagggctgcattgtgacttctgcgggccctatgcacttttctaaacaataaatttgaaatcatacttatgattgtgttgatacacaggcaactatattaatattatatattaaaatattttcttcaaccttaattttttttctattttaaaagaaatgtaaacattgccatgggagtattgtgggccctaggcactgtggctactgtacataatggatccatgggccctccttgtgtctttgttaaagattttactggtttactcttaaaatgtaatcacaattctgttaccacaattttaataatcattcctgttgtcatcaaatatccagtcagtgttcagatttccaagattgttttgtaggttttgtgtgtgtgtgtgtgtgtgtgtgtgtttgactcatgatccaaataaagctgatggtcttctaattctttaaagatctacattttccgtaatttatttaaagtcctttttgtttacttttattatggacaaatttaagcatatacaaaagtggtttattattgctttttttttttttgagatggtcttgctctgtcgcccaggctggagcacagtggcacgatctcaactcactgcagcaacatccgcttcccaggctcaagcgatgctccagcctcagcctcccaagtagctgggactacaggcgccagccaccatgcccggctaatttttgtattttttgtagagacagggttttgccatcttgtccaggctggtctccaactcctgagctcaagcaatctgctcatcttggcctcccaaagtgttggaattacaggtgtgacccactgagccttgcctgttattgctatcttaaaaagaattaatacatgttaaaaatctttttcagttctaattttgaatacagtaaatatcaataacaatattgtaagtaaagcttttcagtgttttcagtaatttaaggggtttatactcttaaaacattgagagatttttttcaaattgagatttaaaaaaattgggaatcactaatctagaagaactgttaaaaatagtcatgcccacctgtgctcacccttagagatctggattcaacccatttggggcgtgagcaaagggacttgtgtaaaatttccccaggcaattccaaagtgcaggctgtgttgagaacctctgctctaaactggagagatcccgtaagaaataagcagccaggtgcagtggctcatgcctgtaatcccagcactttgggggaccaaggcaggtggatcacttgaggtcaggagttcgagatcagcctgttcaacatggtgtaaccttgtctctactaaaaatacaaaaaattcgccaggtgtggtggcacgtgtctgtaatcccagctactggggaggctgaggcaggagaatcacttgaaccagggaagcagaggttgcagtgaaccgagatcatgccactgcactccagtctggtagacagaatgagaccctgtctcaaaaaaaaaagaaaagaaaagaaaagaaaaaaaaggaaataagcaaagatggccgggtgtggtgcctcacacctgtaataccagcactttgagaggctgaggcgggcggatcacctgaggttaggagttcgagaccagcctgaccaacatggagaagccccatctctactaaaaatacaaaattagtcgggcatggtggcacatgcctgtaatcccagctacttaggaggctgaggcaggagaatcgcttgaacttgggaggcagaggttgcggtgagccaagatcacggcattgcactccagcctgggcaacaagagtgaaactctgtcaaaaaaaaaaaaaaaaaaaaaaaaaaaaaagaaataagcaaaggcacagagtgggaaaggcaaccaaatgccctaggtctgaaagggcctcctgggacctgctgcatccagcagaaatgcttgcaagtgcaggcccagacaacccaaaaaacaggggctaaaataaacaggaattcatttttctcataagaaatctgaggatgacagcttccagcattggtttgagcatttaatgatgccatcagggttccagactcttcatatgtttacactccaccctcctacaatgttacccttacatattttctttggctaaactataagcacgtttttcataatagctgttccatttacatcactgtcaaacatgacattcaccaataaagaaaagacgcatgagacgtgttcggcaccccttagctgtagaaatgcctgccaccactttgctgtcatgaaagagccattttatggctattgcaaatgctttgaagatactaagacttgtacctggaagctatagatgcagtgtgggaaactgggaagtataattgccactgaattgttattgatttattactgcaaataaatctatgcaggtcccttctgaaattgagatggtcctgaactgaacaaatgtcttattgacattcataacagtggctggtattccttctttatcctgtttgtcagtttttggaattcactgattagataaataaaaagaatctcacttgctccttactaatgagctccacggaggggcatgatgttggaaaaggcaccatgcaaggcatgattactaagaagacaaagggcttgtcggggagctgttagggagggtcctgagccagggcttgggaaaaacatctcatcattttactgtatctgatgcttggaagtgacatgtgctttgcaaactccagtttatgttttgatgactttgtgcttgttctgcttggttaggattagcttcagctgtgagaaacagaaaaccctggaaacaacagtgtctccaccaagatagaagttcatttctctctcacatgcaaccctagggctggtgtagtgtttaagtgtcagagactcaggttccttctatctatctttttcttccaccagcctcaacatagctcttctctctcaggtccaatatgactgcttgaattccagctttcatgtttgtgttccagtcagctgaaggagaaaggggaaataaggacaacccctcttttttttcgttttttcttttttttttttttttgagagggagtcttgctctgtcacccaggctggagtgcagtagtggatctcagctcactgcaacctccgctccccaggttctagcgattctcctgcctcagcctcctgagtagctgggattacaggcatgtgccaccatgcctggctaatttttgtatttttagtagagatggagtttcaccacgttggtcaggctggtctcaaactcctgacctcaagtgatccacccgccttggccaatacctttaggcaaagcattatagcaggagtctaaaaacaaatgggctgttttgttttgctcggaaatctctccccgagggattgttttgttttttgaagtatttgaaggctaagtatctagagcttgtgctcatggagtagctgccccctttcctcgtgaggccaccattagttacctctgcatatatgtctgcctctgaggtgtctggctgtctgaggaggcctctggctttgttagtacaccactaggatatttgcaacgtggatcaagactttttaatttaatttaattttattttatttttttgagatggagtctttctctgtcgcccaggttggagtgcagtggcacaatctcagctcactgcaacctctgcctcccaggttcaagccattcttctgcctcagcctcccaagtagctaggattacaggtgcctgccaccatgcctgttgcgggaagtcagggaccccaaatggagggaccagctggagccgaggcagaggaacataaattatgaagatttcattttaatatggacatttatcacttccctaataatgctcttataatttcttacgcctgtctttacttcaatctctgaacataaattgtgaagatttcatggacatttatcagttcccaagtaatactcttataatttcttatgcctgtcttactttaatctcttaatcctgttatcttcacaagctgaggatgtacgtcacctcagggccactattgtacaaattgactgtaaaacatgtgtgtttgaacaatatgaaatcagtgcaccttgaaaatgaacagaataacagcgattttagggaacaaggaaagacaaccataaggtctgactgcctgtggggttgggctaaaagagccatatttttcttcttgcagagagcctataaacagacgtgcaagtaggagagatatcgctaaattcttttcctagcaaggaatattgataattaatactctgggagaataattgcattcctgggggggaggtctataaacagccgctctgggagtgtctgtcttatgcggttgagataaggactgaaatacgccctggtctcctgcagtaccctcaggctcactagggtggggaaaaaccccaccctggtgaatttgaggtcagaccggttctctgctctcgaaccctgttttctattgtttaagatgtttatcaagacaatatgtgcacagctgaacatagaccctcatcagtaattctaattttgccctttgccttgtgatctttgctttgccttttgccttgtgatctttattgccctttgaagcatgtgatctttgtgacctactccctgtttgtacaccccctccccttttgaagtccttaataaaaagctgctggttttgtggctcaggtggacatcatggacctactgatatgtgatgtcactcctggcggcccagctgtaaaattcctctctttgtactctttctctttatttctcagactggccgacacttagggaaaatagaaagaacctgcattgaaatattaggggtgggttccccagatacatgcccagctaatttttttgtgtttttagtagagacagggttttgccacgttggccaggctggtctcgaattcctgacctcaggtgatccacccgcctcagcatcccaaaatgctgggattacaggcattagccactgcacctggccatctcaagatggttttaatggttagaaatatcagccaattgaattttcagagacatatgccacctaattttgtattcaatacttaagtcattaaactccagtggtctatatacctgtttggcctctaagacagtttggcctctaagtctgtgagcactttctgtgatgatggaaatgttctacatttatgcaatttaatgtggtggccactattcacatgtggctattgagcacttgaaacatggctagtgcactaagaaactcaatttgaaattcaattttaattttatttaatttaaatggccacaggtagctagctagtgctaccatattagacagcacagctctgaggctcttttaaggacccacataattcaatgaagagacccaagtttaatacagatgtgggatatgcagtcttcataattcaaacacgccaattaatttctgttcctctttttcaagttgggggctttcaagcacaaaggcttttacctggtcttgggcagaatttttctccccaaaattttaccaaaatttgtgctcttttatagtctgtttcttttaactcataaaattaataatggaagacagaggtttttgatgcagttgctttaaaaaaaaccaggttcaggccaggcacagtggctcacacttgtaatcccagcactttgggaggctgaggtgggcggatcttctgaggtcaggagtttgagaccagcctggccagcatggtgaaaccccgtctctactaaaaatacaaaaattagctggatatggtggtgcgcatctataatcccagctacttggggctaaggcaggagaattgcttgaacctgggagggggaggttgcagtgagctaagattgcgccactgcactccagcctgggtaacagagtgagactccatctcaaaaataaataaataaataaataaataaacaaataaataaataaataaaatcaggtttactgagatataatttaaatacagtgaaaccatagctgtacagttgtttatgagtttgacaaacatattcattgtgtaactactactacaatgaagataatatttctattaccccaaaaagtttcctcatggacacagcttttttcaagtcactcctggttaatgtgtcattaggataataaaacaatgttaattcttgaattggatttaggctgtttaaattttgctcaatggattgtacctcggaggtgggagaatttactctggcaacttagtaaaggttggggctgccaagtgaaggcagactgttggtgaatataatttattgggattgaaaaggatacatcagccagattgatgcatgaatgctaatcaagggttgatttagcaagatcttctactaaggaaataatatcatgtacagtgctaatcacatttttttcataattgagttaaatatttaaagtgattagaatagtcactgccacttaatactacttcagaattagctgcttttcttaatatcggtgtaattcacaattcacttccaagctccacctcccttttgactggccaaaatgagttgttaaagagtcctactctttatctcagatttctccaacaatgttatcataattgttattttacatattctcctagggatttgtcactatttcatattacgttgttttgtggggaagtggaattctagaggttcttaagagcttttccagctcccacagttgcaatcgtaagttcagataacatgcccaggggcaggagaaatcaccatagaagctttcttggttctctgtatctcccattaatgtttcataaccttccaccttcatactttcccctccacataccctggtattcaaaatagcccttcttattagattgggttttcctaattaaaagttgccattgatgttatatcccaaagtttctggaattcctaaacattgtcctttgtctaaactgttttaacgtgagtgcagagtgtctccagacacaggttggaacagatctggagggaagaacattggggctgtttgtcccatcgtatgagaggatctggttttagggcaaagctctttaagcttggagaatgaatcgaaggtgtggaagtgccctgtttctgtatgttctaagagaaatgagctcttaacgtttataagctttttgtcttggcattccccttcggtttggtccctagcactgttaaattacatgaattgagggtttgccaaaactactgctaaatttgcagcttctgtatctgctaaaattggactatttttgatacttcctttaacctgttttgtaaccttgttaattttctaatgagcccattgtgctgttgggattccgatatccccaaatctaatgagccatgaccatacacgttagctccattcccactgggttctcaaattctttttcatttttccaattctttagcactttctcttataggcggttctgccttaatttgaaattaaatgagaacttcagccccttcgtctcaccagctgctagcattttaagtgctcaagagccacctgtggctagtggcggctcggttggatagatacagaacatttccctaacagcagaacattgtataggacagcactgctcaagggattgctctccgatgatcacacccactttacagatactaggactgtctaactatgtacactttctttcttgcaaatacgatgtcgaaggctttccctcagtttgtaacttttaacaaatattttagaatctttattgatcaatctctcatacatctgtgcaacaaaaatatatgtattcatttaattctttaattgacaaaaattgaatctgtttatggtatacaatatgatgtttatatatatatatatatatatatatatacacacacacacacattgtttaatggctaaatcaagctaattaatatgtgcattaccttacatattttttgtgttgggtgagaacacttaaaattattcacttagcaatattcaagtacacagtacattgttattaactagagtcaccatgttgtacagtacatatcttgaatttattcctcctgtctaactgaaattttgtattcgctgatgttagtttttacaatcaactcattaaaaacataattaggtcacagaggttaggaggttttgaaaaaaacaaaaaaccaaacaaaaaatgtaattaggtttgtttggcaatctagcaatgcttagtgtgcaatgctttttacagccgctgctaaaagcatagcaaaaccacagaaatctatgtgctgccaaaacctatgtatttggtcgtatttattttgacttgtgttttttgtgtgcttaactttttctctaacttttttttgtaaagaatgctggagtattcccaaattgttgacaaattcccttgtttcctgttctaagcccagatttcagtgttggccactaggtggggataggatcctatttctctatagccttaacatgattttgaatttcgatgctttgcaatggataatctggctttttcctcgaaagctttaaaacatttcttttgtgaattcaaaacaacccacagttttaattctctgtagttatccaataaaaaggaataggaaacaagtgctaaattatttacttacagtgtttctgtatggaaatccttacccccaagacagctggcttcacggcttgactcaatggtgagaaatctgagttgactcacagctttctgacagtattctgatggtaccatgttaggataaattcttggccaaacagaaaatcaagggagacctgcttctccttgtcaaactctaaattaatctactagttcttttcataaagcaaaaggtgaaatgttgaggactctgagttggcgatcaatcgaaatgacttttaaactaagtcccttttaatgatgactgaagacaatattacattaatcactgggtattataaacactggtttctcagtcctctgctgatgagatttgcttgtttgtgtatttctttcttaaaatcccaaatagtgaagtctctcttaagcaatggaggcttattcatagtcaaattccttgcatgtaaaattctctgggtataaagtagattgcctccctcttgtttttctttttcttgagacagggtctcactctgttgtctaggctggagtgcagtggcattatcacggctcactgaagcctttacctcccaggctcaagtgttcctcctgcctcagcttcctcagtacctgggactacatttattttttgtttttttttatttttttgtagagacaggattttgccatgttgcccatgctggtcaagctatctgccctccttggcctcccaaagtgctgggattataggcatgagccaccaggcccagcctgctttcttctgttttaccaagatgcttgacagtggatatataaaatgacaacttccctttctcatatgtggcactgagagatgggcagcctctatttcctacaagaaatatagaatagaaaatgtgtaatttctcatggtgttctgcaaaaattaaaaatttcacagaacactcatctgaatccctggtttgtaactttggctttccaaaacttgcctatatgctaatatgattcataaaacatttgtaataataatttcaaaataaaaattttaaaatgaatttagtcctatatcttctataataaccaatatttccagaaaagtaggatttaagagtatcttctgtaccaatatatgactttctttttcttttttttggagacagagtctcactctgttgcccaggctgaagtgcagtggtgtgatttcagctcactgcatcattcagtcggccgaaggcctggctagaacaaaaaggcagaaaaaaggtgaattcactctctctctgttttggagtagggagtcctatattctcctccccttggacatcagatctccaggttctctggccttcacactcagggacttgcaccagcagccccccaggtttttggtcttggactcagagttactccaccagctcccccggttctcagcccttcagacttggactgagccatgctacaggctcccctgtctcagcagcttgcagaaggcctaacgtggaactcctcagcctccatagttgagggagtgaatccccagcataaatccccactcatctatctacctatatatatccaataaattctgtttctctgaagaagtctgacttcttcagcccccaaaggcccccaaaggcccccaaagcccccaaaggccctagtgctggtctgttacgaacttcctggtagacaatattttacacatggcatcccagctccttgtgggaggaattaagtgtgtcctgtgtggctccagggggacaggatccttggaagcctgagcctggtttctcttaggctttgcccagtgtgcctttccctctgctgagtttgctttgcatccttttactgtaatgaatcagagccctgagtaggaccatatgatgagccctgtgagtcctcctagggcatcatctcacctggggtggctctgaggacccctaacatagctcttcctctggcattggtatctggtaatatataaaatcccccaaaactaacttgtcatcataatttatgaccatatttcatcaaaatttcatgtagtcacatccaagaagttcagttaagaaagaaaaactctttaagcttggttaaggctctgccatttttgaaaattcgtattaatctaataatattgtagcaactataagttttcctgataactttttttttttttttgggagtgggggatggagttttgctcttgttgcccaggctggagtgcaatggtgtggtctcagctcactgcaacctccgcctcctgggttcaagcgattctcctgcctcagcctcccaagtagttgggattacaggcgcccaccaccacacccagctaatttttgtatttttagtagagacaggatttcaccatattggtcaggctggtcttgaactcccgacctcaggtgatctgcctgccttggcctcccaaagtgctgggattacaggcgtgagccactgtgcccagcctcctgattactattatataaaatttggacttagtggcacatcataacatgaaatgactggagacaatatgacttctctctcggtattaaacatcaattaagatgaattacaaaaatcatagtaaactgtattctaaaaccaagcctatgtctgaaaaatctggtatacacacatcttttgaaactaaggatgtgttttcactgtacaacctgcaagaggtgatctggtgaacatagagttatggaataagtgtgtatctataacttagtacaaattatatataaagagaacgataatgtattatgcggctgggcatggtggctcacttctgcaatcccagcattttgggaggctgaggtgggtggattacttgagctcaggagtccaagaccagcctggccaacatggtaaaacctcatctctaccaaaaacaaaaaattagctctcaggtactctagagactgagatgggaggatcgcctgaaccctggaggcagaggttgtagtaagctgagatcatgccattgcatttcagcctgggtgatagagtgagactccatctctaaataaataaaataaaataatatattatgctattatacctattatttaaaattgggatcttatgttgatttctacatttgggaagcatattcctaagaactgacctttatcagtcctgtattgtgttcagtggcaaagccaggcttggtgtctgttccatctgggaacgccaggagtaatggtcccactccttgctgctgagggtacagcatgaatttgggcagcaccatgaaataaagcaaatgtaagaagatcctctatcagttgcactcctatttaataagaagacttgatcatcatcaagaagttaatttctccatgcctgggtaaaaccacactgactcatcctgaggctcttcattggacccagtgatcaccaaatccttcaagcataaaatggccatgtgattatctccttcctctcaggatgaaaggcagacaataacatgtgatttatgttcctcaggaaaggacatgctataaactagagaacttgggaaagaggaagtacatgaattaacatgcaggcacatggtggcatgtgcctgtggtgccagctactgggcaggctgagtggcagcattgtttgagcccaggaggtgcaggctatggtgaactgagatcgtactactgcactccagcctggttaacagaatgagaccctgtctgtctttctctctctctctctctctctcacacacacacacacacacacacacacacacacacacagaaaataaaggagaaaaagaaattgttcttaaacataaaatttaaagtggggttctttgtatcaccacattctttttttttttttttttttgagacggagttttgctcttgttgcccaggctggactgcaatggtgtgatctcggctcactgcaacctccacctcctgggttcaagtaattctcctgcctcagcccctcgagtatctgggattacaggcacgtgccaccatgcccagctaatttttgtatttttagtagagatggggtttcaccatgttggccaggctggtctctaactactgacctcagatgatccacccgcctcagcctcccaaagtgctgggattacaggcatgagccaccatgcccagctgactcttttaaatttcattcagctgtgcgcccagcctcaccacatttttatatgaagaagaaataaaataataattactaattaaataattaaatattatttccttctccttatatgtttgaaaacatcaaagattttctccaaaattatcatagctataaaagagtcaatataatatcaaatggtaacaaattaattcctttatgatgcaaagaatcaatgtaaaattgtgaagaaatatcatccattcacagaagtaactacaaataaaaaatcccaacttgcgtaatgtatttcctcattaagaagaaggcgattatgatgtcctaattttcgttttcttcacttacccctacactctgcagtagtcaggggcttcctgggccatgctggtgcctgacaattctcccacttcctcccagcagctctagcatcttccttccccagccacagaggcgtcccttctgatgtattctggttggttgagccccatcaggctgtttcatctccagcctttctccctggacaggggtagggaaaggagtgctggattcggagctcctccgtccctgcgccgcctcattttctccttggggtctggcgcacagtggccattgcaatacaccctaaagactgaaggagccagcgcagagccaggatcctcctgtgagccatggccctggctgccctgcttagcctctcggaacctgggccatcaggggtgagtgcgcaggtgggcgagggagggtgggggctctgggcgcttctggagcccacagatgctgttttctttcctgttctgttttctctgttctttactgttttgcctgaggctctcttttgctttctctcattctaacaataataaccaccatttactgaacaccccctaagtgccaaacctcatgtccttcctcacaacaccattttcagaaaggcttttattaacacaattttagaaatgaaaagactgagactcaaagagattcataaatgtctcctttcccccacgtcctctcgctgaagagagaagagccagggcttggcaacctcctctggagattctctcgtagattgtagaggtcagcttcctcaaataggagtctgcaatgtgggtttttttccttccttccttccttccttttctccctccccctcctcctcttcttcttctttttcttcttcttcttttctctctctctctcctctctctctctcgacagggtcctgctctgttgcccaggctggagtgcaatcacgtgatcacagttcactgcaaccttgaactcccaggctcaagggatcctcacacctcagcctcctgggtaactgggactacaggtgtctgtcactacacctggataattatatatatatatatatatatatatatatatttttccccttagagatggagtctcactgtatttcctaggctggtctcaaactcctggcctcaagtgatcctcctgttcagcctctcacagcactaagattacaggtgtggggcaccacacccagcccgttagtgactctctctcatttcattcagtcttcaacccactgcattctccctttttcttccccatgtctctgatgctgctctcagggtgacctttatacaacccaaaccagtgatcacttctctgtctctatctcttgtgtgtcatgagtgtgtttgtgatgcgtccgctcctctttcctggatgttttctcctgtctgttgtcttttatgaacccacttcctctttgttttcctcctactttctagtcttctccttttcagcctcttttttcatgtctgtgtttgtctggatgcaggagcacacactcagacccttgctattctgactttatgtacttttcttgagtgacctgatccaaatttagaacttcacttataatgagcttccttccagtctgtgtcactaacctagtgtaccctgggacccaaccatttagctcactatcctcagattaactccatttgttcccacagaaattcaaactaagcatgttccaaacagaacatcttaccttctctcgattatttcatttttcattacctttgcagtcactgatgccccagttctccacgttgggtattctggactccttcatatccctacttctggcacatgatttagtgattcctgtggcttttcgtttcattattgccattcaaacccatccgctgtccgcctcaccccatgttcctgcccctgcctacaccctcatgacttcccatctgatggctgaagagtcctattggtcttgctttcaaaccagcctcctccaacccatcctccctactgctgccccctccaaacacaaatctcatcatgttactgtcctgcttaagatgcttcacaacttcctatgtcctgtgggataaaatgcaaacacctgccatcagcacacaaggcaggttacagtgccgcccggcgcacatctcccctggcttcagtcacactgaagaactgcagttctccttgcaacttcatgcctctctgctcctgagcctgcttctcctgctggacatgtcatttcccctttctctgttttgctaacctcaggtaaacactatccctaggaacctttcctaaatctcatttttcaaaaatgccctctttatgctcctgagtggctccagtgtatatcttatggtactcagtggtgatcaaaataacctatggaaataaaagattaaaaaacacaaaataaaatacacatgtagcaatcttcttttctttgtctctttggattttggatttcaagcagcttgaggacaaggcccaggtcttctgagttacatccttagtgcctaaagagtgaaaattcacaatgagtgtttatttaacagaatgaaaattaacatttgaaggtggaatttgctttaaaatgcacggacctttagttttaggctttgtgaatataataaaaacaaagtaacctaaggtgaacaaacgacatctctgtagcacagcttgtatatcatgtttttcatctgttttttctttgggcttcgtttctgtaggtgagtaattctctagcccataaactcagtggaggaccctcaacatccgtgtgtgacactgaacttgccgtcacttgacgcatccaaggagaggactggttttccccgtgttgggcttggaggggaaatccttgcttaggaccaacaaccatgcagtgtcatttcgcctcacttcctcttccaggctggactccatgctctctcatctttattcttttactgtaatagtaatagacttttttgttgtcaaccttttgctgcgtcttatacatcaggtaaagctaagatactatcccataggtgtttcaaatgcaacaacttttatttccaggtagaactacacttgaaaatatacattcaacaagaacattttgtgaatgttatgtgcatgacaacatttttaaatttactatgacttaaaatgaaagtgttttgataaaattatataaggtaccatttttattctaaaagtaagaacataacttgaagtctataaatagcactaagacttactctggaggtcttttcatgtccttcattatttttttccctgaaagatttttatttcatctccctacttccctgcctttctctgtggctatatcagtattttttatgtctggtcctgtaggggttctgagatcctatgggaatggggtagggggactacgcaattttgtttctaccaggagttgtgtgacttgggtgagttactttacttctgtggtcagttccccaatatgtaaaataatttcctctgttaaatcaagtttagcctaaagttgcctccttacatattttaagtttggcctaaaggtttctctgtacatcatgaactataacaagtggaggtgtaaacagaccatagcctacacttgtgccaatcactgagttttggccaatcatatgtagctaactgtttgaactgtgttcaagttaggcaaacattgagctgtaaccaatctggctgtttctgtacctcacttctgttttctgtatgttacttttctttttctgtccataaactttcttccaccacgcagctgtgctggagactttgagcatactctggcttgggaggctgcccgatttgtgaattgtttattgcgcaattaacctcatttaaaatttattcggctgaagtttttcttttatcaggtggtgtcagaagtggggttggaagtagagcttctaatgacccccagaagtgctgagtgacctagcgaggtaccctccaggcccattgtgtctctttctctctcggagcagctggggatcgtggtaagttctcttgcagattccgaagctccacagatttgtgtgttgagctctctgagtttctttgagtaaatttctgatcctgattgggtttgaaagtcgcgaaagaaattgaactgagtccaggatcggattggctccagtaattaactggcttggatccggttagagacctcttacatctaactggatcagaaagaaaccagtattaaatggcaatattgcaaaggtgtaaaatttggcttttggaaattcacagagatttttatgttctactcctttatttttcttgtgcacttaggtaggaaaaaaaatcattggctaagttgaacaagggacctgagagcaaagccagtatttgaggtaaaaaatgtgatactgaatttctgaagaactgagttccttctggattatacatgcataagtattaggccctggaaggagcaacgccttacagaaattgtccaggcgtggtggctcacacctgtaatcccagcactttgggaggccaaggtgggtagattgcttgaggctaggagtttgagaccaggctggccaacactgtgaaaccctgtctgtactaaaaattaaaaaaaaaaattagccaggcatggtggcatgtgcctgtaattccagctactcgggaggctgaggcacaagaatcacttgaacccaggaggtggaggctgccatgagctgagatcataatactgcactccagcctgggtgacagagactgtgtctcaaataaaatttttttttttttttttactaaagataacttgcagtagaacattccaaaagaacaacactgcactgaagtgcatttgaaaatgagggctcccaaattagtctcatgtacagtctcatgtagggatgcctattgatatgcagaagcttctaaaaaatttcaatatttgcatttaaagactttacaaaaaagaattaaaaagcttaaacaactaattgatttaaaaaattaaatctgccttgcgctttttgctgatggctgtgtgtgacaggattaggcatgtacaggatcatgggacatggggaacttttttctccccaaagcaggaaacttgagagctgatgagatggctggaaaagatccttcatgactgacaagcagctgcctgaactttttttttttttgaaacggagtctcactctgtctcccaggctggagtgcggtggcacaatctcagctcactgcaacctccgcctcctgggttcaagtgattcttctgcttcagcctcccgagtagctgggattacgggcgcccaccaccatgcctggctaattttttgtgtttagtagagacagggtttcaccatgttggtcaggctggtctcgaactcctgacttcaggtgatccgcccaccttggcctcccaaagtgctgtgattaaaggcatgagccaccgcacctggccctgaacttttaatttagtgtcactgcaataggtgggtccttctctgtcctccctgaactctttgccttccccaccctgctgcagacaatgcttttctttctctctttctcttctttcctttttctatctttcttttttttttttttttgaaacggagtcttgctatgtcacccagcctggagtgcagtggtgcgatctcggctcactgcaagctctgcctccgagggtcatgccattctcctgcctcagcctccggagtagctgggaccacaggcgcccgccaccacgcctggctaattttttttttttttgtatttttagtagagacggagtttcaccgtcttagccagaatggtctcgatctcctgacctcgtgatctgcccacctcggcctcccaaagtgctgggattacaggcgtgagccaccacgcccggcctcctttttccagctttctattatatcttgtctagagatcacatgttgaaacttctggctggaggccattccaccccactttgaatagattaaagatagcagagccccaccaggggcaagtttaagccttaccagttcaatattgggcactaagcagagtggctaatgtctatgttttgtcacatgtattttgctgtggctggaagggaaaatgttaattcagttccctcatgcaatctcttgggcagcatcttacaaaattgagaggcttttgcctatggttccctgaaatcagaaaagatgattttcctttgtgttgtggcttggcccccaggctatgtgcagctaacagggtcgctagggccactcagaaagagggaacccagaagcctggcatgctggcaaaagggtaagaatttcttagcagtcaggcttctggcctctctctgtgtggaaacggttgtaggagtagtaaaaatcactgtctcctctgcaaagttttaattaatgataaaaaggatttgtgaggctgggtgcggtggctcacgcctgtaatcccagcactttgggtggccgaggcgggtggatcacgaggtcaggagatcaagaccaacctggctaacacagtgaaacccagtctctactaaaaatacaaaaaattagccgggcgaggtggcgggcgcctgtagtcccagctactcgggaggctgaggcaggagaatggcgtgaacccgggaggtggaacttgcagtgagccgagatcgcgccactgtactccagcctgggcgacagcgagactccgtctcaaaaaaaaaaaaaaaaaaaaaaaggtatttgtgagccaatcttaagctgtagcaaacctggtgtactttgtgctatgaattggtctttctgtgtcatttggtcataaaaggggttaaataggataaaatgtgggcctaggactcccagaagtctgctgttcaagccagcctggcaaactggtcagttacaaactgcgggtccctgaaacaaaaaaacactggataaggtttccctgtcatcttgttttatgtcattgggagcttgaccttataatcacatgatggtactttcttttggtctccaccctctggaggacaggaattttggagttcatgtcatagttagctctaaaaattatcttgagcagttaaaagcctttgcaagctgaaaattggctgctcttaggctcctccttctgggaggaacaatggaaaccaccaacggtgtagcttagtggctaagctttgccatcttatgatggcagccaggcagggttcaattccagctcagggaatgagacctgtttggtttgatatctttctgatctttgctatttgctgattctcttcccctcatgaacaacttctgactctcgtcttgaattttcctttctctgagctacgtttggaaattctagagtttgtaaaaattgcttgctacctttttgaaaatacttcgtacacttgtggttaagtcataaccttgttaaagcttattggtttcacctgggagattacctttggtaaagttcaaaagccagacatattggctgtttggcctggctaaagtcaagtaataagagatttaaaatgattattttaggctgggcgcagtggtccatgcctgcaatcccagcgctttgggaggccaaggaggatggatcacctgaagtcaggagtttgagaccagcctgaccaacatggagaaaccctgtctctactaaaaatacaaaaattagctggatgtggtggctcgcactggtagtcccacctattcaggaggctgaggcaggataatcgctttaacctgggaggcggaggttgcagtgagctgagattgaaccactgaactccagcctgggcaagagagcaagactccgtctctaaaaacaatcaaataatttttttttttttttagaaagagcgctatagttaaaagtcagcttaattaaaagtggatatccaagctataggtatgtttaaagggccttttggttttttctcttcttggatctttgtttttttttaattatttttttctttttagccaactgaattgtttttctccattttgtcttcttgccacttttgttgcacacatgagaggacctaaggtaacttctaacagcctgggactccttgggaaaaacagaggaggcactacgatcctgctttgggatataactcggttttcctcctgaaacaccaggaatcaaaagcagatagatccctctcaaaatctaaggctaaatatccttttggggatggccaacagggtgaaacccagtctctactaaaaatacaaaaattagcctggtgcagtgctgcacacctgcagttccagctactggagagtctgaggcatgagaattgcttgagcctggaaggcggagttgcagtgagccgagattgcaccactgcactccaacatgggtgacagagtgatactctgtctcaaaataaaggaaagaaagaaagagagagagagagtggaaggaaggaaggaaggaaggagggaaggaaggaaggtcatttccacagttaattgcttaatgctggtgcaatttctgaaaacttcacaagtaggcacaattctagaatatggtgtcttttaggaggttcctgaaaggatggaaaggaccccaaaaagtattcttgattacaggtttctgataactttagaatcatatcatttttactgggtaagaattcctggagctttttttttttttttgagacggagtctcactctgtcacccaggctggagtgcagtggcacgatcttggctcactgcaagctccgcctcccaggttcacgccattctcctgcttcctggagcttaaaagactgactggtttataaaactgccatcccaagtagaacacaaattaattgaataccaagaaaatactttgcaagtctttcatgctaaatcacccaatactgaaattgtttagatacacaatttgaagaaactctgtggtctaactcaaattacctatgataacccatcagttatcagtgctatgcacctcaattggagaaacaaccgtgtcaagcatggactcatggagaaccaaggtggctgccttatccttcctgagcttttaaagcttttataatttaaagttctgcattccatgactcatcatggaaaagataaaatgatccaagttaaatgcatattggtgtggtgacttctaaattgctaaaatagtttatgaccaatgtttggtttgccaaacccatattcctgggaagacaatcaaagcttcaggtacattctgctacctcatgagccatttaaacatttatgaagagatttcagtcaattgtcattttcaatgcatgttttctggttgtgtaaaagctttcctatacaagtgaactgatgttataacagtagattattatttcacagtgtattttcaccaggtaaagaaagctttttatggttcactgactgaggacaatcaaccccttcacaatctagaacctgaagattggatcttctgagaacatcagagaaagactgcccttgccatccacactgcagtaaacatcagaaccgtgaactttggcttcatgatctcacaactgagaaggatccctccacattcttggaaatatacacccattggaacccgtaaggtaaagctaaccagggaagtttcttcccagaagaagatggtatccttgatgtgaacagctttcaccaagatcacagatcaagacttctctgctatatggaggctcttatctctgagtattttttcccttgctgatgcctctatgaacagtagaagtgaaaagggggtctgttgtgtgcacttatggggtaggtatacttttattggtgaagggttttgcagccagccttatacatggataacctcacaccttgatagatgaaagatgaaggcccagtgtaggtgagaaattttaatggtacataggttgcctcataatcagtcagaaacagaacattgattcactcccctattccacatcatgggttaaagagaacattgccaggaggccttcagtcttctagaagggcatttttccttaggtcctttttaccatgatttggagtaaaacaggcaatgattagaaatgtatccctcatgataggctctaaacagagtctactgtaagggcgatggttacacaacagattttacattcttttgtgaaagttatgcttaatagtaggattgctgtagattacttactggctaaacagagaagtatctgtgcagctgctggcacttgtggcctatggagaaatacatcacgtcaggtgtacagagattcagttgtaggtaattaatgaagagactgcttaaatgagtaaactctttatttagctcattctttgatctatttaattttgggtggtttggtttatggggaccctgtgtaaggagcatactccaaactcttggtattatcctcctgatagtcataatagtagtctacctggtgcactgtattctctcgaaagttttaaatgtttgcatgcagccatctctagaatgtcaaattgtctctcttcaactagaatgacaagattgaaagaaatgtgtgaccatgatggcattttaacctatgaatgatgtgttgagactggaaacccaaaatgatggtaactgagagtggcgctaaggccctaagctttggtcacattctcacctaagtgagaacctgaccaaaaaggggacatttttaaacaaaatcatgggaggccattgttttggactttaatgaaaggctaaatgcactaagccccaacagaccagaccaaaccaaaatggagtcacttgtgctaaatgtgacatgattaaactaagactttaaggaaacacatagatcctaaaacagaccaggttttgtttttttctcctataaacagaacgttccaacaaaaggaggtaacccttacaaaaataaaattaaaataaaataaaataacctgaaatccttgttcccccttacaaaactcattgttctgctatttcccagggggtttcaagaccaaataagtacatttacaatggtgatagtggcatcgatgactaaagttttggtaaatctctaaaaattgagaagattaccaaaagaggaaaattgttaaatcaagtttagcctaaagctgcctccttacatattttaagtttggcctaaaggtttctctgtacatcgtgaactataacaagtggaggtgtaaacagcctacacttgtgtcaatcaccaagtttcggccaatcatatgtagccaactgttcaaactgtgttcaaataaggatacacccagctgtaaccaattgggtgtttctgtacctcacttctgttttctgtatgtcactttcctttttctgtccataaatcttccaccacatgcctgcaatggagtctctgagcctactctgcctcgggaggctgcctgattcacgaatcgttcattgctcaatttgactcttttatattgaattcagctgaagtttttctttttttcttttttctgtttttttttttcgagacagagtctcactccgtcacccagtctggagtgcagtggcgcaatctcagcccactgtaacctcctcctcccggttcaagtgagtctcctgactcagcctcccaagtagctgggactacagacagcatgcctggctaatttttgtatctttagtagagacaaagaggtttagtagagacaaaggggtttcaccatgttggccaggctgatcttgaattcctgacctcaagtgaaccacctgcctcggcctcccaaagtgctgggattacaggcatgagccaccgtgcctggccagaagtttttctttgaacactttttttttttggggaaggagtctcgctctatctcccagactggagtgcagtggcgcgatctcagctcactgcaagttccacctcccgggttcacgccattctcctgcctcagcctcctgagtagctgggactacaggcacctgccaccatgcccggctgattacaggcgtgagccaccgcgcctggccttctttgaacacttctacgtggaagtgtgaggattcaatgaataagttgagcacatggtacatgttcagtgaatattttctgattgtgttcagtgttatcattattggaatgatgtgagggttgtgtaagtcttcagagaccagggaaacaactgaaatcttctatgagtcatttctatcattgtttatccccattccttttcttttcattcatttttgcatttctcattttctgtgttattcccttgcattcttaaaaactttcccattacctgcttgcttcttgtattctgtgtactttcctatgtgttcctcattctgcagtcttcttccccttcaagcagcagaccatgtgtcaacgtatgcagagtttgtgcagacacacagaccctctggggagtatatgtttgaatctgatgaagatgagcagttatttgtgcacctggacaagaaggagatggtctggcatctgtgagagtttattcacactgtgaggggcagaaaatgaagggaccagggatggaaagggatgggggacaaaacactaagctggcagtcctaaccccagtgtgtttattctactccaggtgtcaaactttctcagtcagaagttgacataaggaagtcaccagcttcggtctcctttaaatctccaggcctaactttcttttgaatctctgctcttcaaccacaatgacttatgtaccccaagacccctctacctcctggctgcctatgatcctcctgcacctagcactcagcaaagggtctgacatttagatagcactcaatcaatatgaagaatttaaagtgtagtgacaaggtggtgcccacactggatggtctgtatgctgtggtctcatcagggacctttctctgcactgcatttttcctgagaaatcccagagttcaataaatacctgtgtatgtcagagctagacacatctgatgcctttctgtgactccttatattctcagtttcctaggaatgcatatcctggacttgtaattgtaggatacaggtgcattatgggtgcagatacctcagttttgcatcctgcaagagttagtctgcagattgttcactccactctgggtacggctgacacctacagcatgcgtccaggggacaaaaatggaaggagatgactctgattggatagtgagaggaacacgggtagctctggtaaactgaccagggataggcgcccaggggcacacaaggcccagaagctgcttgtgagaagtcagggagaaggaagccaacaactggatgtatcagagagccactgagtgctcattatgtgtatcaggagttaagaatccatcctctacacgaaaaggaaagcttagaccaaacatgtcttctaccttgatttacagtaacttaatatgaaatgcaaaacacataaaaattttggattgtaaaaaaaagatcagtgtttgaaagagtgccacacctattgctttgcactttcaacaatggggaggcgtttctcactgtatgaattattagctcaggaggtctaggctggtgaatgaatgcagacttagaggataaatgtcgtctacttgatgcattcaaaaggccaagcaacatttggttaaggagtatttgtgatggcatgcaaagaaagtgttgaaagtgtgttagattatatttatcgttttaaattctgatgcttatttaatttcttaacagtaatgctaaaacatgctcttagtaagttatatgttgaatcagtgctatgttaatatgggccctataacacagatttgcagtctgttcaccactgaatagctaagaatagtggtttcagacctaaatggatgaagacaccaaacatgaggatggggcagctcactgaaatatagtaaatccaggagaggtctatgtccaacaggccaccttatacaatagtttggatggattttcatggttttcttctttcttatgtctaaaccacaatgaacttctttattaactcttactgtttgctaaaaccctcaagaaaaaaaagtgatgagacatgacttggtgtatattcttaacagaaaacaatcatgttgggttttgattactcatggcactaaggagaaaggaacttggttggaggccccatgagagaaatcatgcattgaatccaggaacagaatgatagaaactggcttcagtgcaactactcagcagcagcatcctcttgggaggctgggggtctgtcctcgaagcaggtactgggactaaagaaacagaaaatgcttgttccaaggtacattagtcttttaggcaaggtcagcaaccctgtggaggtaaaaaacagtaatcccaggttgctggcccccttcctttaagtcccaggagagaaaaataacggtgagaggctgaatctcaggctgataaagaatagagttgatctgagcttcctttagcaatggagccatgcaatgctctttccccactcaccccagggctgaggttgaaacaggggttcaggcctgagactctcttcctagaggagcctcagtgtcacaatgtacagaaaggacttatgtcctcctgtaactcccccaacaaggaaatcaaagcaggaatattgcctgtttatgcagatccttgttgaactgaaatgaaaggaagaaagagaatgtattcagctactgaaaccacctcagacaattagagaaacgtttccatcatacttccattgtccatcactcaatggacgctctgcaggagcctgagtaactgggacctcatgcatctggctgcattaagatgccaggctgggattcctctctccttagaagctgtctttgtttcctgactatgtgatttcagcaagctctctggcattgcttttttgtctcagcccctcatcatggaagaagggtgagcaagtcaggagaaaggtgggtatcggtcacctcacaggatttctcacctttcttcctccttctgtgcgtgaagatgtccactccacagatgatgagccccagcatgaagcccctggctcctgtcagcatcttgctctgcacagaatcagactgtgcctctaggaagaacaggctcaggttcagagtcacctccagcagctgcacccctgctcatgtcctgtctgagatcctgcagcctgatgcagaatattggcacgaggagagcgaggggaatacaccttgcatgacaggaaactgagaaacagtcactctctcaattctagaacagagggtgtgacctcaacaacagacaaattcagattcaattagttgcctctcaaaataacttagaataagctaaaaggctgaaggaagacaacagttcccatgtgtaacgtcagttcaggaaggtgtctgcatccctagattcttggacaaggagaggaactatgaatccttaggacctcctaggccgggggcaggcaagtctccattgtccccaggttaaaactacactcagtgtcttctatagaagaaaaatggggtcggacatggtcccagggtatagacacataaaaccagatgagtggaccccagagccagagagtcccctgctcttcagaggtggagtctagagggtcatcagaccctcactccactccacggtgacaggactgtccaggctggggtgctccacttggcaggtgtagatgtttccctgctggggggtcatttccagcatctccaggatctggaaggtccagtctccattacggatcaggttggtggacacgaccccagctgtttcctcctgtccattcaggaagcatcggacttgaatgctgtctgggtagaaatctgtcacgtggtagacaagcaggtcgtggtgctgctggggctccttcttggaggggagatgttcaccctaggctggactaggagtggcgaagtggaaaagtggaatagcatttgagattattatttcttagacatgctcattatggaattgatttctagatgttgaaaataggaatgatggccaggcgcagtggcttacacctgtaatcccagcactttgggaggctgaggcaggtggttcgagaccagcctgactaacatggagaaaccctgtctctactaaaaatacaaaattagctgggtgtggtggtgcatgcctgtaatcccagctactcaggaggctgaggcaggagaatcgcttgaaccccggaggcagaggttgcatgagctaagatcccaccattgcactccagcctggacaacaagagtgaaactccatctcaaaaaaaaaaaaaaaaaaaaaaaaaaaagtaggaatgatgtgattaggtcagcagataaggggagtattgaaactatagaaatagtattgagaagaataggaggcacacaaacttaccagtttgtagcacatttaaaagaaatcttatctatcagccactgattaacagcctttggacaaagaatatttaatcagcagcgacactaccttatcttttgagtgctctatcctgatgcaaaagatgaaaaatttgctcaaatgatttcttgaaattaatatatatataaacaacattctcatggtctattaatccaataactatatttcataaatatatcaagaaaataaagtgagcttgacgtgacttattctgcaagtaacctatggattttttggcctcgcctacaaacactcaaaatcgtcctatttacataatatcctgagcccctacatgcttaaatagtagaaatcccatccttttccctaagttcctcctctgcactgtgttgtcacatccattgaggttctcagataaccaggtgttggctgtgccttggcacctctctatttttgccccctctttttctgccgcttacagatcaatttccacgctaccacctgcagcttttcctttggacctcagccactagtacccttttcctccacagaaggcagaaaagggccaactgcccctagagaacagctcaattacaggaatgttccaaatcagagcttctaggtccttatttactctgttcttgagaacacaaatacactgacatgggcctgggccaggtaaatgaacagtctttaactaacccccaacccttactccctatggcatttttgccttgtgtccaggattattcacattcacagcctcttccctcgatgtgattttatttcagaggcacttggctctcgttctacttcaaccacctccataaactcaacatccatcagactggtcagcccatgtctgaatcccaactgtagattaagtggaacttcttccccataggtgtcctgggaagcatgaaagtcatgggatatatggttgtctgttttaaggtcccagaacattccatgagaagcactttgctccatcttctttgacgggagctggtcagcctggagcacatcagagacctccagggggcgctgcagctaaggcttgatacccagtggcctcatttctgacccagttcaaatatatttcaccaaggcaaggattcctgtttgttctagttgcctttgctcagttaattctagatttgggtgggcatccacactggaatggccagaacttctatcctcctctttcctccgtctcccctacccctgtgtttttctttattctaattcatgcccttattatgatttccctggacaataatagcagtttcttatctcatctccctgcctctggttcctgctctctccaactgacttcacagtcttctgaaaacagatttccagccttgtcattttttttttttttttttttttttttttttgagacggagtctcgctctgtcgcccaggccggactgcggactgcagtggcgcaatctcggctcactgcaagctccgcctcccgggctcacgccattctcctgcctcagcctcccgagtagctgggactacaggcgcccgccaccgcgcccggctaattttttgtatttttagtagagacggggtttcaccttgttagccaggatggtctcgatctcctgacctcatgatccacccgcctcggcctcccaaagtgctgggattacaggcgtgagccaccgcgcccggcctccagccttgtcattttaagatttctgaagattttcaaaaatcttcagtgttctgacacttatctggttacatgggaatcacttgggagctgattaaaaacacagatctccagacctccccacctagggaatctgaatctctaggcagtgagtctgggggaatctttgcttcacagaggatctcaaggagagtcttctgagcagtgaggttggggacctgctggcctagaggagaaatccacactccttagtctggcatcagggggtctctgcaatctggcagctgattaccatgaaagaaaatgctgccatgtcgctgatttgggcctctatgaagtcttagtgacagattttgcaaattgtattacttttatttggacacctctctcaaccaattacgccagcaactttcctaaacccatgtcactctcctcatccttactcaatgtgtgcatcttctccctcttatcagatgaccttcctttcactttcccaggaacagagggatcaatggtgtgacctcctgagcctcctcctcctcccccttcattctttcctctttctctaggacaaaggtccttgtttagtgagaggctcactggtgctttttggtctccttcacgggatttctctcttggccaaattaatacacgagttattaagagattatttttaggcagctaaaaagggtaaaagttctgggtggaattttcctttaataaaaagcagccccaagccattttttctctaacagaaagcagcctgaaaactcaggcatagatatgcaaactagaagcttttatgtaaatgctggcagctgttcctggaagtcaggtaattcaatatggctattctcaccctctttcccttctacgtttacaggtgtcaaggcagcctccaggttaaagcacgtgtacaggtatcatggccgccaccaggtggaggccgcatttgtataataaaatactagggtgggaaggccagtctttttgcaggttatgtaaatgacacacctggtcaaaccaatcccctgagccctatgtaaatcaatcactgcctcctcaagcctctgtacaaaaccaattgctttccaccagaaacaggagaccctctcttgggtgacctgccttatcagcattaggaagcttttcctctcactcctcttttctattaaactttccgctcctaaacccactccttgtgtgtgtccgtgctgtgaattcttttcggctatggtaaagaaccagggtatataccctagacagtggagctgtttcattttgggagctcatccgggatccaaatcagaatggaagatagaaacatcggagtggtgagtatagagcaaacgtcaaatctgttctttaatctcaagaatctcttcataccagtttcctttcatggagaacttcaccatcgcatgaggctgggaaagtcttggggcaactgaaaatttctggccagggcacaccctggtgttattcaaaggcttctggactgaacgcagcctccgacagcctgtccaggtgttggtaatggatctccagctaacccgttgcaaaattttcctttcctttgtatccgtggtcactatgtctcctgtcctctctctctgtgtgtgcaatttgcgggaagttttacagttcagggaaacactcctgttagggaagatcggcaaatgccacaggcagtaactgttactctctatcctctctggcgagcacatggtagtgctaagccaacagcaccacctagtggaaataaaaatcctcttcatcaggcaccttgtcggttttttaccgtaacactgccgcttccaaattctttcgtgccgctagaaaagcctcttctgtgaacgagaaagcactgtcttcaacagtttggagtaaaatgtcctctgtagtgaaattttagttctgatactgtctcatcagcaggaaaaacagccattaggttcctacgttcatttccgtctccaattaggatagtacttaattagcaaggggattttaggttcggaagttaaccagagccattttgctaagggtaaatgtcttagcatgggccgtaatggcaggcaatctagcacactgcctccgttaaaggagcctacccaaagatgacatagtctctctggagatccatttttctgggagccaggcagatcacacaaatttaggacgtcaaaggggatcacataaggtggataagctaaggttgtgtgggtaaagtatggttaatcccatcacttagtttatccagttccacggcttggaggaccacgcctacaaccatgggtggtacatttaacacgttgccaggacccaggaaccaaggagagaaaacagtagggaggacacttccactgtcttctcctccaccctgggtcacaatgaaagaatggggacgaaaggatacttttattctcacttctttttctagatgggtgacagaccagcttcagcttgcacccctctggagtgcactctgaaacactggaactcctttaacctcaggactttgaagagaaaagtgactcattttcttttgcacaagggcatggcttttttactaaacctttgcaagcactgtaagatcagcccagctttttaaataggcatatcaggtaggcctatagaaaataatcccccagaattagaaaggcaatttccaagggaaccatctgagaattccccttatttagggttgccaatatgggggaagtaaagagaaatcagactgttgctgtgtctatgtagaaaaaggaagacataagaaactccattttgatctgtactaaggaaaattcttctgccttgacatgctgttaatctgtaaccctagccccaaccctgtgctcgcagaaaacctgtgctgtattgactcaaggtttaatggatttagggctgtgcagggtgtgctttgttaaaaatgtgtttgtaggcagtatgcttggtgaaagtcattgccattctccagtctcgagtacccagggacacaatgcactgtggaaggccgcagggacctctgcccaagaaagcctgggtattgtccaagggttccccccactgagagagacagcctgagacatggccttgtgggaagggacctgacctgaccgtccccaaggctgattcccataaagggtctgtgctgaggaggattagtgaaagaggaaggcctctttgcagttgagataagaggaaggcatctgtctcctgctcatccctgggaatggaatgtctcggtgtaaaacccgatcatacattctatttactgagataggagaaagccgccttatggctggaggtgagacatgctggtggtaatactgctgtttactgcactgagatgtttgtgtaaagtcaaacataaatctggcctatgtgcacatccaggcacagcacctttccttaaacttatttatgacacagagtcctttgctcacatgttttcctgctgaccctctccccaccattaccctatagtcctgccacatccccctcactgagatgatagagatagtgatcaataaatactgagggaactcagagaccagagccggcacaggtcctctgtatgctgagcactggtcccttgggcccactgttctttctctatactttgtctctgtgtcttatttcttttctcagtctctcgtcccacctgatgagaaatacccacaggtgtggaggggctggcccccttcaacctcaagctcccttttcattacaggaccttaggcaaacaaaggaagacttatgctaattttctgataaccccaataggtatatagaagctgtccagaatttaactcaggtgtttcacctcacatggaaggatgttatgctgctcctaaaccaaactctaaccgcagttgaaaagcaggcagctctgcaggcagcagataattttggagatgagcaacatatctcctataatacaccaaaagggaagaaaagagatagggaaagtgaaaaaaataacagaaacaccattcccagtaggaagggaagcagttcctctcgacaaccccaactgggaccccagtagctctgcaaatgaatagaaatggaagcatttttaaaatatgcatattagagggtctatgaagaactaaggcctgacctcttaattcctctcaactgtctatgatagaccaaaagccagatgggaatcctgcagcttttatggaaaggctgagagaggcactaatagagcacacttccttagcccctaattcagtcaagggatggctcattgtaaagacaagtttattacacaggcagctcttgatattagaaggaaactgtagaagcacgctataggaccagatagcaccttggggaacctcctgagggtggccacttataatagggaccaggaggaggccccccagaaagagagaaagctcaggagaaagacagaggctctagtagcagctttgcaagcttgcaaagtccaagatttctgaggtgcatccgctagttgctatcagtgtggcaagccagggcattttaaaaaggagtgcccaaacagcaagaggaagccacctcaaccctatccagcctgtggtggagaccactggaaatcaaactgcccccggagacggaggtcactggagtcagaaccagtctcacagatggtccagcaggactgatgggtcctggggctcaaaccccagctccagtggctcaaactgccattacagcacgggagccaccaggtgattctggaaattgaaggaaggaaactagacctccttctaaacactcgagccagtctctctctcttttctcctctttaatccaggcctctcttcttcccatagcgtgagtgtaaggggtgtctcaggaaaaactctattccaatatttttctcaacctcctaattgcagttaggaggacctattgtttacacatgcttccaagccattgccacggtggctctactagtcaaaaaagcctccaaattaaccctaggaaataatttaactgtttacaccccacataatgtagcaggattactgtcctctaggggagactttagctaacaaacagcaggtaaagcaagaaatacataaggcaggacaagcaatagtcactctaatgtctctccccagacacaagcactcaattagctgaactaatagttcttgcaagtgcacttaaattaagcaggggaaagatagctaacatttccactgactccaagtatgctttcttagttctccatgctcatgctgctatttaaaaggaaagacattcttttaccactaaagcatctcctataaaatatcaccaggaaattaacaggttattatcctcagttttcctttcacgaaaaatagcagtaatgtattatagggaacatcaaagaggaacagatgaagtagccaaaggaaataggttagctgagcagggagctaagcaggcggcagggaagcctcaaggcattaacacacttcaagcccttttaatctcggaagcctccataaaagaaattaaacctcagtattcccctgcagaaataaaataagccacttcttaagggtattccagccctgaggatgacaaactccatttactggcctccagtcaatggaaagtccttaaaatccttcaccaagctttttcacataggaaaggataaaacttatcatcagtgtgctcagagattgttttcaggcagaaaacctctaagttgtttaaaaatgtaacctctctagctcacttccaacagaaattgacacaactagccaaaggccaaccccaggaaattggaccaccagaaaatttggtattggtgaaaactcatctctctctccttccctaagccaggctgggaagggccctacacaattcttctttcaacccccccagcagtaaaagttacaagtatcaacctctgaatatatcacactcaagtcaaagcctgaaaagctgagggagcaacctttgacagcccagaggaacatcctgaatatcaatgtggagatatagaagatcttaagctgaaaatcataaaaggtaagtaaatgagtgagggctactcgccttagcgccaatcctacctcaccaggtactctttatcatttctacctttcctctcaaaattcactgctcagtattagaacttttttttaatgcatatttgcagagagattttaattatacatgggactgcatttgttactttgtaaatccccaaagggaaacattatatcttggcaagtaaagttttaaatggaaattatttactacgtcacttttgtgggaattgttatcatcatgctgttatttgcaatagaactgtatactgtggcacccacaatgtggaattctggttgtaaaattctaattcctgtaatattttgcctaattatcatctttatgacagaattaataattgcaggaaggatttggtcaagtttgttttgcttatagcaggagtaatagttacagacaagaagtaagcatgaaaattttactatcactaagtttgataggacttttttattgaagattggtaaatggtgcactctaagctatggaaagaaggttacaaataaagggattttatataagaaaggatcttgtatagtaaattcttgtcctaaaaggaaatgactggttgtttaagacaagtcagaaagttgagtacattgtaagagggtctgtgaaagtcatgaaagaatttaataattaagaaatttaataattaaaggaaaggaattgccaagattaacaccaaagttattttagccacccaataacgtttttctcccaatcatatcataagttataaagaatggcctaaaccaaaaattatgccctaatagcaagtcaagggggaaacatgttttctcaaaggaaatgatgcttttatattaacgtttctggtaatgtacagcgacatctagtggagacaaaccagtattacaatccattggtgtaacaggtatcaaactctactgccatagttacagtctataggtggtaatcttaatactcatatggtaaccctatattttaaaccttcttgtaaaatttatctctttttgcctagaagcaatcaaacttcaaatggtgctgcaaacaaagccacacatggacatgccattcttccaagaagccttagatcaacctcaggaggagccccaactgcagccccccgacacgacgccccttttcagcaggaagtagccagaaagaatcgtcgtccaacaccccctaacagcagttatggttacgtctcctgagggaggaaataatacaggagttattaagaaattatttttaggcagctagaaagggtaaaaattctcagtggaattttcctttaataaaaagcagccccaaaccatttcttctctaacaggaagcagcctgaaaactcaggcatagatatgcaaactagaagcttttatatgtaaatgctggcagctgtacctggaagtcaggtacatccaatatggcggttcccactctcttttccttgtcaccacgtttacaggtgtcatggcagcctccaggtaaaaccacatgtacaggtatcctgtccaccaccagttggagaccgtatttgaataataaaagactagggtgggagagtcagtcttttcgtgggctatgtaaatgacacaactggtcaaaccaattccctgagcgctgtgtaaatcaatcaccgcctcctcaacctctgtacaaaaccgactgcattccaccacaaaccgcagaccctcttttgggcaacccactttctcagcatgaggaaggattttttctctcttttcttttctattaaactttccactcccaaacccactcctcacgtgtgtctgtgtcgtgaattttctcggccatgacaaagaaccagggtatataccccagacaatggagccgttacaaaatcacaatgtccagttcccaggatccagtcctatgctcctcccgatgggtcccctctccctgggtggtctcatgtaggccaggcccctcccccgctgcaaactcttctctcacctgcccatcagaccacccatctggcccctcaagcacctcaaacccggccatctccctgcaggtttcttctctgcgtggcctgctgtgccatctccaccttcatctccacaccgcacccctgcacgatgtcctgtggcctcgtttcccctcaccccacatgcagtcagctgccaggcctgatgaagtcccaggggtctctctccctccatcctcctcactccatgctcagcccaatctccgtgctcaccctcctgacaagctccggttgggctcctcccatcaatccccagctcaaagtccccttccctcctggcactaaggtcccttaggccggcccggctgcccctactccctgggcccggcccccacggctgccccaggagccctggttcacagccctcacctcggcgctgccggatgagtggctccatcagctcgtacttgtgtctgcacaccttgtccacctcggctcgcttccgttccataaagtccttctggctattgaagtactcgcctatgggccgccccagctccatcactgctaggaactcccccactgcgctgtcaaaatgcacgtattcctcccggttgtagatgagcccgtccacaacgcgctgagtcccattgaacgcatagcattcctgccgttcctggtagacggaattctctgtgaagagcagggagagatgggggtggtgccactcccaacaacacccccctcctcaatattagctatttcctcaaatcttcccactcaggactggatttaaaaatacgatttttcctactaccgagttctgtggtcctaggcaggtcacagactccaggcatcagttttctcaccacgcagcgagaggatttactgaaaagaatgagactcactgctcagggtggctgagtgatcattagggaggggcgcacgctgaagggaaagcagccctttctgctggcggctggaggaggagggggagacatttcacgtctcagggaggagcagaatctcatcagggggagggtccctcaggcagagaaacagtagggataggaggagttggggacctggagggcagagctgctccccctacccaactccctgcctgacatttccatcctgatgtcagtcctggctcaaatgccacctcctccaggaagccctccattccttctttccctttctacagctaggttctctctcttctctgccagtttcttgagaatacctcaagttgctcttgctgttctgcatgctggacatctctgcatgctggaaatgcagaaatgcatttccatgcattcctccctccctccctcccttccttccttccttctttcttctttcaatggagtatccttccctccctcccttccttccttcctttcttcctttctttctacagagtatcactctgtcgcccaggctggagtccagtggtgcaatctcagctcactgcaacctccgcctccagggttcaagcagttttcctgcctcagcctcctgagtagctgggattacaggtgtgcgccaccacgcccagataatttttgtatgtttagtagagatggggtttcaccatgttggccaggctggtctcgaactcctgacctcgagatctgccctcctcggccacccaaagtgctgagattacaggcgtgagccaccgcacttggccagaaatgcatttcttaaaacttcttgaagtttgccataagaaagactatatagcctgaaagttaattttcactttcaaacatggctgtagaaagacttgatctcaaaacacctggaaaatatcttaatcaatgaaaatcaccagaacaaccagaaagctaagtgactggactcctttaggtttagaggcattgatggtgtcatttttacataaagaaatgtggcagccttttccacctgcagttcttcctagggagcaccatgggcagtgtccggcaggtgcatgtgtatacagaagtagcaatgacccagcacatgtctgagcctcttcagacctgatctgttcctggtcacagtggggaaattaaggtgctgtgatttgcacacagcaaattaaggtttgttttggacacctgtttcatgttctacaaattagcaactcacgtttattaacctcacccctcatagaagatgcacagctggtggcagaggacagtagagaaggggtggggctgggcacagcggcaccgtagactcggcctgtagtttccagtgtcatctctaaggcaagatcccaggactttagatatcttaacccgcctcttctcctagtgccttgggctccagccccctaaacacccaggcccatcgcccccagcccctttagtctgcccctccctattcaagtgccccactctgagtgtgtatcctctcattttaatttgttagtctttgttcctcttcctcattcaccaataagagaacatgttttagtcaagagtaagaatttcaaaactttcttttgcaacatttaactttttaaagggaattttacctgcaaagcagatataagtgatgagtatatggtggaatttgaaacttcattttttttttgtatatggaaaactttatcctgtttgcggaatctttgacaattgagttacccagagcacaatttgaaaaccaatgatctgagtgaattcatctctcactcagaataggttatattaaaatataattgcagaaagatataatggagtccatatgggtaagaaaaggaacatgtcacaggtagggattccagttcttgcactacgactgattactaagttatcttggacaagaaacaaccttctaactctccatttcttgaaaggcaaaatagtaataatactatttaccttgcaaaactgctgtgagaaccaaatgagctcacatatgtcaaatacatagtattgtatctgttactgctcaatctatcttagttcccttcctcttttcactgtgtgacctgtttgaataggagcaaaattctaaataaatgcatatgaaagaggaactggatcagcttatgagctactggaaaacctcaagaagactttccatgggcaccagatcttaatggttgaaaagtgtttgttggctgtttgctgactggatcttcccccctctcttttgtgctagggattttatttgaggagttagattaacagaagagtgagtacccaaagactcaaatgcacaatgagcttctgcaagtgcccagctggtgtgacaggaggactcgggagtgtggccctaatgcttggggtagtgggtggggtgaggtaagaaactcagctgtaaaaagcccattttaaagcttgtcagagacaaaagggtgttgcctccaggagtctggttttttcacctgccgtgtcatctcctgctccctaggtgttgtctcagccaagcttttctccaccctcccctctctcactttaagccacagcctggctccttgtgcctttcctcttgtgctctgaggatggagatgtgtgtggagttggaagagcatgcagggaattgtggaattggccctgcccactctacccactcccctatggctccagctctccctccagcaggttttgattggacattcattctacacggggagctctggtaacccaccctcggttcctgtcacatggctccactgcctcatctcatttcccctaccaacctcaacccagtctttgcccgtccacctgttcactgcccaccatcatcacgctccctcctgtgctttctgctaccccgcaccttgagggtttccatggcgtttcccaacaccacccctcatcctacaaacaactctgcctatggacactgttgctatggacctcctgctggacactgttcagtgtcaccagcgctgctccagcctcctctctccccaacctcacccctctccagttcccagggctgagccattctgctggttagttctcagcacccctgtgactacaagtgcagtttgtccaccctttcccggacaatgaacctgaggtaataggtgaggggctttggggtttgaggggctgtcctcaggagattcgaatactgttaccctggaaaatgaggaggtgacatgagaacagcactttctaggggtgtcctaggtggatgtggaagggtctcagagggagggtctatgcagaaaggtggaagtcagtggaaaactaagacacctactctgcagtccttcctctcagggtgttggtgtaaatttggaccagaaaagtaagaacatcctgagagaaaaacaatgggtcatagaagccataatattacaccagccacaaggagacagcaggagacagaggtttttcccttggttactgctttcttggctgtctgataacctacactcaatctctttcacgtactcacacatccttatctcattcttctgacaggtttcaacccatcctaatactctaaccaagttctggggaggctgggagaaataccttcaacaagagtgcctttaggggctcgaacctgtccccctccctcccatcttgccttcattgtccagggagcattggctcctgctccaccctggagaatgagaggcattctctgtgagcactgaatcctcagtgatacttgtagtctggacacaccagctaagggctctctgcctgagtcccctcaaggttggatgcagatgtgagcacacccaggagtctgcacttgccaacctctctctctgaaaccttgtctgtccaaggttatcctgaacctcttggccccatttccccatagacaagcaacttgacccctgagcacctccccttatttactgtgtccatgttcctggagagagaatagacctggtggatagcaacctatcctataggaggtgagtttgattctccagctgtgatagaaggacactaggccgtggcaggagccccacatgctgtctcagagtctggttccataaagagaaagtcccctaggaattgttccctgagccagaccctccaggaatagcagctctgctcttacctggagtggccctgctctggaccacagatatgagcagcaccatcagtaatgctgtcagagccactgtccaggggccccctgaaacctgcaggatcatcatggagttggaaaaggttggcagaatgaagagagctgcagtcaggaaaacaagaactcattaaagggagctcctgtctgaaatattagagaccatgaacccaagcagtcttctgtgaccctaggattggacagactctgagaaaagaaccaatgggcactgagctttgtatgagtcattgctcactgggcagaaagttagtattaaagatctgacaatatagagccagtgatgctgttacgaggacagatggagaacactgacactcattttaaccagtcagagtcatgagttttggggagatgatgtgttttctttgctctgaaggtgatctcagatattctgctggcccacctacagggattatcatttccccaattctgccacacctcacacacccacaggacatggcctggtgtggaagaaatgctatctcaatgtgtaaaaggtcattcagtggcatgatttagagagattagagtatccatcccagaactgaaaatgaggcctggagtctgttttgcctttgttcaaggccgtgcttcagattagtgcacattcatattttcttcctcccacatgtctgtgagtcctgagatgtgcgggggatactggctccttccataggactgtcatcagggtcagcagggctcagtctaggggccttacacctgggagcatggacacaccacctacactaccatggaagtatgcagcttgaaggacactgcctgtcttggacttcagttctttgtcttcagtatggggatgatatgacctgcctttacagcagggctcttaaggtcaaattagatcaacggatctgtaattgctttggaaaaatgagactaaaaattatacagtgaatgaggaagaaatgaaaaaatgtcataaaagaccctacattttccaaaacatctgattctgtggtgtttatactgaatagtttcataaactttcaaagaatattactccttaatttaaagacctataaatgtgatcctgtacgacctcctaatctaataaagaaaatgtaaaagtggcatcatttgtttatataaatgttaaaatgtaaatagaagactagcatgtaaaattcaagagaagaaaataattatgcagtagaaggggccagtataggattgcggggaaaaagctcacgttccctgccatagtcaccaagacagcatggtactggtataaaaataggcacatagacaaagggaacagaatagagaacccagggataaacccaaatacttacagccaactgatcttcgacaaagcgaacaaaaacatatggtggggaaagacacccttttcaacaaatggtgctgggataattggctatccacatgtaggagaatgaaaccgggtcctcatctctcaccttatacaaaaatcaactcaagatggattaaggacttaaacctgagacctgagactataaaagctctagaagatcacattggaaaaacccttctagacattggcttaggcagggatttcatggccaagaacccaaaagcaaattcaataaaaacaaagataaatagttgagacttaattaaactaaagagcttttgcacggcaaaaggaaccatcagcagaataaacagacaacccacagagtagtcacaatctatacatctgacaaaggactaatatccagaatctacaatgaacacaggcaaatcagtaagaaaaaacaaacaaccccatcaaaaagtgggctaaggacatgcatagacaattctcaaaagaagatatacaaatggccaagaaacataagaaaatgctcaacatcactaatgatcagggaaatgcaaatcaaaaccacaatgtgataccaccttactcctgcaagaatggccatgataaaaaaataaaaaaacagtagatattggtgtggatgtggtgatcagggaactcttctaccctgctggtgggaatgtaaactagtacagccactgtggaaaacagtgaggagattccttaaagaactaaaagtggaactataatttgatc

SEQ ID NO: 112 - DNA, 2129 bp, Homo sapiens
  misc_feature (1808)..(1808): n is a, c, g, or t
tgagccgagatcgcgccactgcactccagcctgggcgacagagcgagactccgtgggcttggcggcggggcaggattccaggcaggagccttgcctctcaggtggcgggctctgcgaccctgcgagatggacgggacagaaggcagtgccgggcagcccggccccgctgagcgatcccaccgaagcagcgtgtcctccgtgggagcccgagcggctgacgtgctggtatacctagcggatgacacggtggtgcccctggctgtggagaacctgccctcgctcagtgcccatgagctgcaccgcgctgtccgcgaggtcctgcagcttccagacatcgccctggatgtcttcgcgctctggctggtctcccctctgctggaggtgcagctgaaacccaagcaccagccctacaagctgggacgccagtggccggagctgctgctgcgcttcaccagtgccccagatgatgacgtggccatggatgagcctttcctgcagttccgaaggaacgtgttcttcccaaagcggcgggagctccagatccatgacgaggaggtcctgcggctgctctatgaggaggccaagggcaacgtgctggctgcacggtacccgtgcgacgtggaggactgcgaggctctgggcgccctggtgtgccgcgtgcagcttgggccctaccagcccggccggccggcagcctgcgacctgagggagaagctggactccttcctccctgcccacctctgtaagcggggccagagtctctttgctgccctccggggccgtggggccagggccgggccgggcgagcagggcctgctgaacgcctaccgccaggtgcaggaggtcagcagcgacggcgggtgcgaggccgccctgggcacccactaccgcgcctatctcctcaagtgccacgagctgccgttttatgggtgtgccttcttccacggtgaggttgacaagccggcccaaggctttttgcaccggggtgggcgcaagccagtttctgtggccatcagtctggaaggcgtgcacgtcatcgatagcagagagaagcatgtcctgctgggcctgcgcttccaggagctgtcgtgggaccacacctcccccgaggaggaggagcccatcttgtggctggagttcgacggggacagcgagggcacacctgtcaacaagctcctcaagatctactccaagcaggccgaactgatgagcagtctcattgagtactgcatcgaactgagccaggcggcggagcccgcaggcccccaggacagtgcgactggctcgccctcggaccccagctcctcactggctcctgttcagcgccccaagctgcggaggcagggcagtgtggtgtccagccggatccagcatctctccaccatcgactacgtggaggacggcaaggggatcaggcgagtgaagccgaagcgcaccacatccttcttcagccggcagctgtccttgggccaggggagctacaccgtggtgcagcccggcgacagcctggagcagggctgaggacgctgcacccggcaggaggagggcgactgggggccctggcccggcactgtcctcctgaggggcaggcgccggctgcaacagtctcatgggtcaccacgtggggagggctgcctcagcaggtttctcagaccacggagaagtgacttttgggcccggggccatgcccgggctgtgcaaagctggccagggcctcctgtagggctcctctgcagcctgccctgccttcccccggatgctgggccctgctgctctctcaggaccatccgatcaagctgcagctgccnacctcacctagaaacatgcctttgtgcccacctcaagatgggcagtgtccctgttctgaagtgccagtggcagctccagtggtagaggaccacgcttgaggtttgggacctgaagctccagtgtggtgcctttggcctcttccctggactgggttgaccgtctcgtcttcctcctgctagtgctccaccccgcgggacttgggtgaaccagtttccaacattcctccggatggtgctcaattaccccaataaccaggtggggcacccattctgaagaagggtaggaaggggcgaccccgggattgtaacgggggccagaaa

SEQ ID NO: 113 - DNA, 2138 bp, Homo sapiens
agtgcgcactcagcccggcccgccggtcgccacagcaacaccaatcccgggttcaagcccgcctaggaagtgcggtccccgcctgaccgccccgggcttaagggagcctggctaggccggcagccggatggtcccgcagctcggggccggccatgcttcgcggtccgtggcgccagctttggctctttttcctgctgctgctcccgggcgcgcctgagccccgcggcgcctccaggccgtgggagggaaccgacgagccgggctcggcctgggcctggccgggcttccagcgcctgcaggagcagctcagggcggcgggtgccctctccaagcggtactggacgctcttcagctgccaggtgtggcccgacgactgtgacgaggacgaggaggcagccacggggcccctgggctggcgccttcctctgttgggccagcggtacctggacctcctgaccacgtggtactgcagcttcaaagactgctgccctagaggggattgcagaatctccaacaactttacaggcttagagtgggacctgaatgtgcggctgcatggccagcatttggtccagcagctggtcctaagaacagtgaggggctacttagagacgccccagccagaaaaggcccttgctctgtcgttccacggctggtctggcacaggcaagaacttcgtggcacggatgctggtggagaacctgtatcgggacgggctgatgagtgactgtgtcaggatgttcatcgccacgttccactttcctcaccccaaatatgtggacctgtacaaggagcagctgatgagccagatccgggagacgcagcagctctgccaccagaccctgttcatcttcgatgaagcggagaagctgcacccagggctgctggaggtccttgggccacacttagaacgccgggcccctgagggccacagggctgagtctccatggactatctttctgtttctcagtaatctcaggggcgatataatcaatgaggtggtcctaaagttgctcaaggctggatggtcccgggaagaaattacgatggaacacctggagccccacctccaggcggagattgtggagaccatagacaatggctttggccacagccgtcttgtgaaggaaaacctgattgactacttcatccccttcctgcctttggagtaccgtcacgtgaggctgtgtgcacgggatgccttcctgagccaggagctcctgtataaagaagagacactggatgaaatagcccagatgatggtgtatgtccccaaggaggaacaactcttttcttcccagggctgcaagtctatttcccagaggattaactacttcctgtcatgaaggctagaggaagacttcctggaactgcctttcttccactaacaggaccctgggacctgtaggagcaccccgtttgggactgtgaggtgtttgagggtgtggactggcatccagcagccactaacaaacacacaactggtgtgtaaaaggcaggccttacattagaagccaagccaatcctttttcttttttttggaggtcccaccgagatagataggaacttggattgctgaattcaaaaacagagcccattcttaagatcacttggtgccttaaagacacgcattccaaagtggaatgtggttgaagaaagtgggccaggtggttgaagaaagccatgtgggagctcagcaaatcccaagggcttattatgacactccagatggtctccttagcatctcagctcttctgcaaggaagagcttgggtgttaggcctcagaggctgtagggtccttgggttacagagccggggagaacgaagttctgtgacccaggggtggagaatacactctaggtttgcaggctggtgggctttcaaattggtacttccagaggaaagccaagctgcttctgttgtgagcgaatcagccaagagcctgaggctgaagggaaaagtacacagaggaagatattttacaaaccaggtcagtgtaggccaagacttatggtctacagattttggcgggggaggggggaccttttcaaagacaatagggggtcttgacatgtttgttgtatgtaaagatgataagattaaaatttttgattttcctaaaaaaaaaaaaaaaaaa

SEQ ID NO: 114 - DNA, 2054 bp, Homo sapiens
cgggaggcggcagcggctgcagcgttggtagcatcagcatcagcatcagcggcagcggcagcggcctcgggcggggccggccggacggacaggcggacagaaggcgccaggggcgcgcgtcccgcccgggccggccatggagggcgcctccttcggcgcgggccgcgcaggggccgccctggaccccgtgagctttgcgcggcggccccagaccctgctccgggtcgcgtcctgggtgttctccatcgccgtcttcgggcccatcgtcaacgagggctacgtgaacaccgacagcggccccgagctgcgctgcgtgttcaacgggaacgcgggcgcctgccgcttcggcgtcgcgctgggcctcggagccttcctcgcctgcgccgccttcctgctgctcgatgtgcgcttccagcaaatcagcagcgtccgcgaccgccggcgcgcggtgttgctggacctgggcttctcaggactctggtccttcctgtggttcgtgggcttctgcttcctcaccaatcagtggcagcgcacggcgccagggccggccacgacgcaggcgggggacgcggcgcgggccgccatcgccttcagcttcttctccatcctcagctgggtggcgctcaccgtgaaggccctgcagcggttccgcctgggcaccgacatgtcactcttcgccaccgaacagctgagcaccggggcgagccaggcctaccccggctatccggtgggcagcggcgtggagggcaccgagacctaccagagcccgcccttcaccgagaccctggacaccagccccaaagggtaccaggtgcccgcctactagcggctggcaggcacagaccagggctccaaggccaccccaccaacgcaggccccagggtctccgggacctcccttgggtccttccagctcagtgccgcggacagagtaggtggccgctttgcgccatccggggccaagagggggtggacccgcgtgtctgggctgcccctgccaagttcccccagtccctcagcacctggccccaggactgaggtcctgagaaggggatagcactgcccaggacgtgtgtccctagcctggaatggactggcctggggaaggctttcccctcttgggccacacctgctcactctggggttgggggtccagctgccctctacgatcaggtgcaggggctgcccaggacaaagcgggggcaggggaaagacaccaccctcgccccaagactggggatcctggccactgttcccatcccatgtccctgtgggtagtgactgtctcgtttctgtcatggtggtgcgtcccgtccggagccactctccactttctctcacaggctgctagaacagcccagccctgtcagtgttgtgatcatggtccagtcttcgggtttcacctcctagtactccacaagctgctcctctctctgtggccccggcccctgcccaggtgtgggtggttctggccaggaaggcacaaggtagctgtgggccaagacaccagccctgtcctagcccttcagtaagaccttgccaggagaggagaaggatgcctgggtgccaggcaagacaagcccctcagcaggagagaggcccagaggctccagctggccaccgtgccccacaagatggcccctgtgtggttccctttaccttggcttcctggcccagtccctgcctctccacctgcaccctgcttcctggcccagtcccaggttggagtccctctgcatagctgactactcatgcattgctcaaagctggcttttcacattaagtcaacaccaaacgtggttgccacatttcatcagacagacacctccctctggagatgcagttgagtgacaaccttgttacattgtagcctagaccaattctgtgtggatatttaagtgaacatgtttacaatttttgtatatatcactctctccctctcctgaaagaccagagattgtgtattttcagtgtcccatgttccgactgcaccttctttacaataaagactgtaactgagctgactgtgaaaaaaaaaaaaaaaaaaaaaaaaaa

SEQ ID NO: 115 - DNA, 1395 bp, Homo sapiens
cctactggggaaaaacatctgcctgaactccaggcagtaccagcaccttccttgtgtccagcgttgcatggggagtgccagacagcaaggccccacttgtgggcaggtctgtgcactgtgacatgccagcctcttcacagcccaggtcatcctcacctccaccccatgaggtgcaactagatgaaactgccacttcccagataaggaagatgcacagggagctaagaggcccggctgaaggtcccacagtgagaaaagtcagtagcccagctgtgggcctgagccccaggtgctccagtgggcaggatggagtcctggtcttcagcaaggctcagcttggtgggggggacacatccccgaccccagacagactttgagttctggcagctgggcactgggggagctttctgggaacaagcgtgaaccacacatggtccctgccctggagtcgcttacatctcccaggagagggggatacatccacagactgtgaacacatgggcctaagaggggccacccagggctgcagaactgatccatcccatacaaaatcactgaaaagacccccacagaccttgcttaaaaaatagtcttcttggccaggtgcagtggctcacgcctgtgattccagcactttgagaggctgaggtgggtggatcacctgagggcgggagttcaagaccagcctggccaacatgggaaaaccccgtctctactaaaaatacaaaaaattagccgggtgtggtggcggatgcctgtaatcccagctactcgggaggctgaggcaggagaatcgcttgaacctaggaggcagagattgctttgagctgagatcacgccgctgcactccagcctgggcactagagcgagactccgtctcaaaagtctcctggcggtgtgtccgcatcagagttcaggtcgttcattgtgaatggatggtgcatcttttacatctaagtggactcctttttaagccgtatttgagacctagttggctttcccttcccaagaatgtcctggcccatggtcctggagacctctgaacctgggtgtccagctactagacacgtaaaaaccatttctaagtaccccttgtgggccaggcttatatctgtaatcccaacacttagggaggctgaggcaggaggattacttgagcccaggagtttgagaccagcttgggcaacagggtgagacccagtgtctacaaagagtaagatgattagtggaacatgctggtgtgcacctgtagtcccagctacttggaggctgaggtaggaagatcacttgagcctgggaggttgaggctgcagtgagtcttgattgtgccactgtactccagcctggacaacacagtgagatcctgtctcaaaaaaaaaaaaaaaaaaaaaaaaa

SEQ ID NO: 116 - DNA, 119198 bp, Homo sapiens
gatctgctaagttcagggatggctcccatcctaagcaggatcacacagtcattcttctgctattttagggcacaaagtagcaagaacgtcccccgcctccagaaagtcctccaggcctttctctcccattccatatgaaacccaaacagcccggagatgccactggcttccaaaactgaagtactttgaaggatgttctccatcatggaatatttctgtaaatgttctttctccacatttctgacctcactatcaatgccctgctatgtgtgcaatcgagttaaactgaaacgtgctcagtgcggcttctacttcacctgccctcactttgtgagcctgaggctgagggtgagctcagcaccaaaggtgatcctgagtgtctctgttgattgagcatgcacaaggcacagcagggactggtaccattcatccaagatctcagctctccctcacgaggaatctaaggcatgttgctatattcctcatttttaaagtggtgaccctgagacttggctagggagaggaacctgcccgtgttcaggcagcaaatgatggacagacccctctggtgaggagctcagaggatcccctaaggagttcaataatctaaatgttgaaaagaactgattgacagactttcccttcctgcccaattcagaaggtccagcaccacccccaggaccccagtgagaatcccgcacttgggggcatttctaccatgtcctgtcacctgttcttctcaaggtgctcatctgctgtcaaactcagagcatccttcagagcccctctgagaagatgacctgaccccttctccactcacagaatctccaccagaataccaaagctcccccaggcacttgctcagggtctctagaatatttctgagcttctgtttccctcctgcagactgagctgtcaaggcaggtatctctttatgcatcctggatacctcagcccaaatctcctgaacaacagaacatggccacaatgctgggagaccttcaccccagagcagtcattgaggaattctcccaaaattctattgagctattttggtgaacatgagaagccataaagcagggagttcctcagctgctgctctggccctaaagaggcccctgggacaggactgctggagggtgaccctgcctggcacgcagaaggagacctgagtcctctggtcttcctatgggtgccaggctgagaagaggtcctgggaaatgtctcggtgcaggggccatcccttcccaggctcccctgggtcagccttagagctgacaaggctgcacctggaatgcagtcagtctgtttctgtccaagtcaggtctcttcttagcctgagctgttcaccctctgtgcatttctaagagtcaaaatctctgttctggccctgttgcccttctctggtcctcaaccgggtctgattccaggtcagattcatgcacatcgtgtgctaaagtaggggcttcctctctttcttcctccaatcaagtctgaggacaaggtcaccctgaaagcagacacttgatgctgagggaggtgctcagagcctggggtgggaggaggtctgcaccctcactccaggctggacagagccagagggactgaaagtaggaatggggccaagaaggggagtgatcagaggagctgatggggctgaaataaaggggaaggagggaggtggcagcagagcaggcagccaggttctctggctctcatagagctgtgtctctgaaaggcagggacttgtgtctgagaccgtggggcactggggcttggacttgggtctgtgagttcccaagacactttatgtgccctggtctgcatgaggttttagtggctgccccatcctgccccaggggcacagagtcaggagagtggggagtcccaggagaggaagagcgggtggcgagtgtccatcctggatccaaagacaagcagcaggtcagaaggaagcagctgtggcttgaggccaaggaaaggattctctttggaaatcgtgcagctccatcttttcactggtcagagccttatgggacggtgaggactgggcttttcaggagggaatgaaaaagaatggggtctggctcagagtccctgacatccaagttattccaaacctcctctgacaagcaaagggaaaatcatggaggatggaagtcaaaccaaggctcacatggctgcccagagctttccagtggatccagagagggcacaatgatcctcagtcagaaaagtcctccaatgtccagcactgaggcccaacaagagtgcctggaggggactctctgtgacatgtctgaagagaagattctggcacatgtgactcctcccacaccctctgcctccccctgactcctctccccttgattcattcaaagaccttcactgagcaccagggattgcttcctgcaattccgggtgctaccagggaagatgaataaaatgcaaggaagctggaaaatgaactcagcagaggacaccaggctcagcactgcaatcccggtcagaaaaataactctgcaggctgcgcggtgcagagcgatcataataacccatggggataatcacaggtgtcccaaatcctttaatcactttttgttggaatatgaagaggtctctcactgctgaatataaatatacagggaagtgaaaaacattagtaaaacgaacatttactaagtgcaatgtgactcaaagcactgagaagccaagggttttatttctttgaaacaacttgccaaggcagtttgaacagtgatcatcttcctcctgggctcagcaccgcagaggcagctggtgtcttctccacctgggagagttgtcctgcttttttttaagttgggataggccagtgagtcgggaagtttgttcatcttgggcttggggtacaggaggagttggtggggtgcctgtggccactccactgccctctgggattaggaggagacagtggggtcaggactcaccccctggcctgtgcttcaggtgatccctctctgtcctgtggatgtggggttgggagcaggtttggggtcctcgcctatccccattggctcttcttgggaagatgaatttatggggcacctgcaggtggccacgtgtgggaaggaatctcagaacttacatggatccatgcaaatgaggcttccttcaggcagacagaggaactctgagcctccctgatgctgcaggcacctgggtttggggaccctcttggagacaaatgcatggagcgtcccagcaagtttccctgtctcccagctcctccctgggcttctgcatccgggagtcagggccggatcaagagaagccctgcggggagtgggaaggacataggattctcagggtctcaagttcagcttttaacattatcctcaaaggtggggtttttcccagaggcctcctttccacagatcccatgccttcttgctggactcacgggaaacttgccctgctagagacatgggatattttacttttctgtgccatggagccatgctggagagctgtgacttcctagctgaccacacacacacataaacatgtaaacaccatgaggtcattgtagggatgcccactgggcctgcggttctcccatagcacccagttcataaaagcctccctttcactcacctggggcctggagtcattggcctcctcctgtctcattgatccagcatttggccttgactggccagtgactcagaccccagcaagaaggacaaaatgactagttcacgtgctttaggggaaacacagagagaatgagaagaccagtgtctgaactggcaggttgtgaattggctcagggagatgagactggagaggtgcagccaggggcaagggtgactcaggggtcattggcagtttgggattagggttgtgaggccacttgaagcctatcttccacatccccgaggtggctgagaggaccgtgttccctgaggggacaaccagagggcagggacacgcttcagaagattcttgcactgtccagacaggaggtcctggtgtccacttgagtggccatggacagcatagggacgtcctggaggcagagtcagcaggacttgctcttaattcttcctggggtggatgtgaagcttgtgtcctggcagagggagtggttggcacagggctgagttatcccctgtggcctcaactgttttcctgattatgcctgttgtctttgaatgtcaacaaaagtagccaacatttatggagggtttattatgccccatgctttgggctcagcatttttacctgaagattgagattatccttctacacatttgatggagaaagagacacattcaaagagagagggagaaattttcaaggccagacagcctgtaagtggtgggactggaatgacggaatgtctgtttgtcaacatctttggcggtgacatgatactgtcccagtccctgcaatgtgctgctcattttcatcctttcaaataaaactccacagtcagaggcttgtgcaagagttggggtccagagcatcaggtctaatgtttgctatgtttatattcactgccaaatctgttattccaaagaaattttactagtgaaatagaaatacgttgtctgacagcattaccccctgtgatatggtttggatcgaaccattgctctccagcctggcaacagagtgagactccatctccaaaaaaaaagcaattaattataacaacacgtctcttcactctccaaagtgtctgggactggacaattaattgtcaggccctcttctgtagcaccatacactagagcatatacgtggattaaaataaatacacacacaaaatgcaagtatatattcttttttcattattattatactttaagttttagggttcatgtgcacaacgtgcaggtttgttacatatgtatacatgttccatgttggtgtgctgcacccattaactcataatttagcattaggtatatctcctattgctatccctcccccctccccccaccccacaacagtccccggtgtgtgatgttccccttcgtgtgtccatgtgttcttattgttcaattctcacctacgagtgagaacacctatgagttttgttctagggtttttatggtttgaggtctaacatgtaagtccttaatccaccttgaattaatttttctataaggtgtaaggaagggatccagtttcagctttctacttatggctagccagttttcccagcaccatttattaaatagggaattgtttccccatttcttgtttttgtcaggtttgtcaaagatcagatagttgtagatatgcggcattatttctgagggctctgttctgttccgttggtctatatctctgttttggtaccagtaccatgctgttttggttactgtagccttgtagtatagtttgaagtcaggtagcatgatgcctccagctttattcttttggcttaggattgacttggcaatgcgggctcttttttggttctatatgaactttaaagtagttttttccaattctgtgaagaaagtcattggtagcttgatggggatgccattgaatctataaattaccttgggcagcatggccattttcaccatattggttcttcctacccatgagcatggaatattcttccatttgtttgtatcctcttttatttcattgagcagtggtttgtagttctccttgaagaggtccttcacatcccttgtaagttggattcctaggtattttattctctttgaagcaattgtgaatgggagttcactcatgatttgactctccgtttgtctgttagtggtgtataagaatgcttgtgatttttgcacattgattttgtatcctgagactttgctgaagttgcttatcagcttaaggagattttgggctgagatgatggggttttctagatatacaatcatgtcatctgcaaacagggacaatttgacttcctcttttcctaattgaattccctttatttccttctcctgcctgattgctctggccagaacttccaacactatgttgaataggagtggtgagagagggcatccctgttttgtgccagttttcaaagggaatgcttccagtttttgtccattcagtatgatattggctgtgggtttgtcatagatagctcttattattttgagatgcgtcccatcaatacctaatttattgagagtttttagcatgaaggttgttgaattttgtcaaaagccttttctgcatctattgagataatcatgcggtttttgtctttggttctgtttatatgctggattatgtttattgattttcgtatgttgaaccagccttgcatcccagggatgaagcccacttgatcatggtggataagctttttgatgtgttgctggattcagtttgccagtattttattgaggatttttgcatcaatgttcatcaaggatattggtctaaaattctctttttttgttgtgtctctgccaggctttggtatcaggatgatgctggcctcataaaatgagttatggaggattccctctttttctattaagtggaatagtttcagaaggaacggtaccagctcctccttatacctctggtagaattcggctgtgaatccaactggtcctggactttttttggttggtaagctattaattatttcctcaatttcagagcctgttattggtctgttcagagattcaacttcttcctggtttagtcttgggagggtgtgtatgtcgaggaatttatccatttcttctagattttcttgtttatttgcgtagaggtgtttatagtattctctgatggtagcttgtatttctgtgggatcagtggtgatatcccctttgtcattttttattgcatctatttgattcctctctcttttcttctttattagtcttactagcagtctattaattttgttgatcttttcaaaaaaccagttcctggattcattgattttttgaagggttttttgtgtctctatttccttcagttctgctctgatcttagttatttcttgccttctgctagcttttgaatgtgtttgctcttgcttctctacttcttttaattgtgatgttagggtgtcaattttagatctttcctgctttctcttgtgggcatttagtgctataaatttccctctacacactgctttgaatgtgttccagagattctggtatgttgtgtctttgttctcattggtttcaaagaacatctttatttctgccttcatttcgttatgtacccagtagtcactcaggagcagattgttcagtttccatgtagttgagcagttttgagtgagtttcttaatcctgagttctagtttgattgcactgtgttctgagagacagtttgttataatttctgttcctttacatttgctgaggagtgctttactcccaactatgtggtcaattttggaataggtgtggcgtggtgctgaaaagaatgtgcattctgttgatttggggtggagagttctgtagatgtctattaggtctgcttggtgctgaactgagttcaattcctggatatccttgttaactttctgtctcattgatctgtctaatgttgacagtggggtgttaaagtctcccattattattgtgtgggagtctaagtgtctttgtaggtcactaagtacttgctttatgaatctgggtggggcaacccgctcgggtccccttccacagtgtggaggctttgttctttcgctctttgcaataaatcttgctactgctcaaaaaaaaaaaaaaagtatgaatctgggtgctcctgtattgggtacatatatatttaggatagttagctcttcttgttgaatggatccctttaccattatgtaatggccttctttgtctcttttgatctttgttggtttaaagtctgttttatcagagactaggattgcatcccctgcctttttttgttttccatttgcttggtagatcttcctccatccctttattttgagcctatgtgtgtctctgcacgtgagatgggtttcctgaatacagcacactgatgggtcttgactctttatccaatttgccagtctgtgtcttttaattggagcatttagcccatttatatttaaggttagtattgttatgtgtgaatttgttcctgtcattatgatgttagctggttattttgctcattggttgatgcagtttcttcctagccttgatggtctttacaatgtggcatgtttttgcagtggctggtactggttgttcctttccacgtttagtgcttccttcaggagctcttttagggcaggcctggtggtgacaaaaatctcagcatttgcttgtctgtaaagtattttatttctccttcacttatgaagcttagtttggctggatatgaaattctgggttgaaaatatttttctttaagaatgttgaatattggcccccactctctttctggcttgtagagtttctgccaagagatcagctgatagtctgatgggcttccctttgtgggtaacccgacctttctctctggttgcccttaacattttttccttcatttcaactttggcgaatctgacaattatgtgtcttggagttgctcttctcgaggagtatctttgtggcattctctgtatttcctgaatttgaatgttggcctgccttgctagattggggaagttctcctggataatatcctgcagagtgttttccagcttggttccattctccccatcactttctggtacaccagtcagacatagatttggtctttccacataggaccatatttcttggaggctttgtttttttctttttattcttttttctttaaacttctcttcacacttcatttcattcatttcatcttccatcgctgataccctttcttccagttgattgcatatgttaatgaggcttgtgcattcgtcatataattctcatgctatggttttcagctccatcaggtcctttaagaacttctcttcattggttattctagttatccatttgtctaattttttcccaaagtttctaacttctttgccattggttccaacttcctcctttatctcggagtagttcgatcttctgaagtcttcttctctcaaatcatcaaagtcattctccatccagctttgttccattgctggtgaggagctgcgttcctttggaggaggagaggcactctgatttttagagtttccagtttttctgctctgttttttgcccatctctgtggttttatctacctttggtctttgatgatggtgatgtacagatgggtttttggtgtggatgtcctttctgtttgttagttttccttctaacagtcaggactctcatctgcagttctgttggagtttgctggaggtccactccagaccctgtttgcctgggtatcagcagcagaggctgcagaacagtggatattggtgaaccgcaaatgctgctgtctgatctttcgtctggaagttttgtctcagaggagtacccagctgtgtgaggtgtcagtctgcccctacttggtgttgcctcccagttaggctactcgggggtcagggacccacttgaggagggagtctgcccgttctcagatctcaagctgcatgctgggagaacgactactctcttcaaagctgtcagacagggacatttaagtctgcagaggttattgttttcttttgtttgtctgtgccctgcccccagaggtggagtctacagaggcaggcaggcctccttgagctgtgatgggctccacccagttccagcttctgggctgctttgtttacctactcaagtctcggcaatggtgggggcccctcccccagccttgctgccgccttgcagtttgatctcaggctgctgtgctagcaatgagcaaggctccgtgggcacaggaccctccaagccaggtgtgggatataatctcctggtgtgcagttgttacgcccattagaaaagcgcagtattaggatgggagtgacctgattttccaggtgccatctgtcacccatttctttgactaggaaagggaattccctgaccccttgtgcttcccaggtgaggcgatgcctcaccctgcttcagctcacgcacggtgcactgcacccactgtcctgcacccactgtctggcactccccagtgagttgaacctggtacctcagttggaaatgtagaaatcacccatcttctgcatcacttatgctgggagctgtagactggagctgttcctattcagccatcttaagtatatattctaaatactttctatatacttatattctaagaggtcacatgcaaattcaaggctaggtcaaagagtagagtggctatctatggaaaggggagtggaagtgaatcatggtaataaaaattaagtatagatatagataggaatagatagacatacacacatatagctgcaagaaaggggaatgtcatggaccaatgatgtcagtgagccatgtaaaaaggctacaattcttgtgattgtgtgtctgttttcaggatgggttgtagcttacctttttagaaaggctgatgccacagccatagtgaataaatggttataaaatgtgtttcctttctggggcatctctggagaaatctccagtggtaggagaactccgtttactgggcaggtgatcacacagataagatttttcagatccaatggcactaccattaacttcattatccttggtattctacaaaggtcgagtgaagaaatggtatcttgaaactaaaattagctaaactaacaaaggagactgggttaattttttttttttttttttttttgagacagagtctctgttacccaggctggagttcagtggtgctatctcagctcactgcaacctctgcctcctgggttcaagtgattgtcatgccttagcctcccaagtagctgggattacaggcataccaccacacccagctaatttttgtatttttagtagataacggggtttcaacatgttgcccagattgctcaactcctggcctcaagtgatccaccagcctcggcctcccaaagtgctgagattacaggtgtgagccatcatgtccagcaagactggattactttaatgaaatttttaccaccccctatgggaaaacacagccagatcccccataaggtatttttttttcaccaactgcaatcagaaacactgataattaagtatttactggagaacctatgcctttgataatagaacattatgtatcccctgcactttttagctctgatcatgtaaccagaggatcaactccaacagattagtcattgcttaagttgttacaggtgatgacgcaaagcccaaattgctcaggcatgtccgatgggaaaaaggtttaacctcttaactattaacacagccaggcggactgtttgaattggcatcatctgaaaccagttggagagatgatgcaagcttgctccaccatccccagattggggagacaggtttagaacttgtctcctatctgcttgtcagttaactcttttttatttttatttttatttttttctttgagacagagtctcactctgttgcccaggctggagtgcagtggcatgatctcagctcactgcaacattggccttccaggttcaagtgattctcctgcctcagcctccccagtagctgggattacaggcatgcaccaccatgcccagctaatttttgtatttttgtatatttatttatttatttatatattgatcattcttgggtgtttctcacagagggggatttggcagggtcataggacaatactggagggaaggtcagcagataaacaagtgaacaaaggtctctggttttcctaggcagaggaccctgcggccttccgcagtgtttgtgtccctgggtacttgagattagggagtggtgatgactcttaacgagcatgctgccttcaagcatctgtttaacaaagcacatcttgcaccacccttaatccatttaaccctgagtggacacagcacatgtttcagagagcacagggttgggggtaaggtcatagatcaacaggatcccaaggcagaagaagttttcttagtacagaacaaaatgaaaagtctcccatgtctacttctttctacacagacatggcaaccatccgatttctcaatcttttccccacctttcccccttttctattccacaaaactgccattgtcatcatggcccattctcaatgagctgttgggtacacctcccagacggggtgatggccgggcagaggggctcctcacttcccagtagaggcggccgggcagaggcgcccctcacctcccggactgggcggctggccgggcggggggctgaccccccacctccctcccggacggggcagctggcctggcgggggctgacccccacctccctcccggacggggtggctgccgggtggaggggctcctcacttctcagacggggcggctgccaggtggagggtctcctcacctcccagaaggggcggcggggcagaagcgctccccacatctcagacgatgggcggccgagcagagacgctcctcacttcccagacggggtggcggccgggcagaagctgcaatctcggcaccttgggaggccaaggcaggcggctgggaggtggaggttgtagcgagctgagatcacgccactgcactccagcctgggcaacattgagcactgagtgaacgagactacgtctgtaatcccggcacctcgggaggccgaggctggcggatcactcgtggttaggagctggagaccagcccggccaacacagcgaaaccccgtctccaccaaaaaaatacgaggaccagtcaggcgtggtggcgcgcgcctgcagtcgcaggcactgggcaggctgaggcaggagaatcaggcagggaggttgcagtgagccgagatggcagcagtacagtccagcttcggctcggcatcagagggagaccgtggaaagagagggagagggagaccgtggggagagggagaccgtggggagagggagaccgtggggagagggagagggagagggagagggagagcaatttttgtatttttaatagagagggagtttcaccatattggtcaggctgatctggagctcctgaccttgtgatccgcccaccttggcctcctaaagtgctgggattacaggtataagccactgtgcccagcccagttaactgttaataaatttttttttcccaaaatggagtcttgctctgtcacccaggctggagtgcagaggtgcaatctcgactcactgcaacctctgcctcacaggatcaagtgattcttctgcctcagcctcctaagtagctgggattacagacatgggtcatcacacccagctaatttgtgtatttttcatagagacagggtttcaccatattggccaggctggattcgaacccctgaccttgtgatccgcctaccttggcctcctaatgtgctgcaaatataggtgtcagccaccatgcccagccttttttgcttttctatgcacttaggagagtgagcccatcgttcagtaacaatatgactcagtactgcaagacctttcaaagcctatttccagttggtgaaggagggtttcgatgatcactggaccttcatgccctaccatttggagactgcatcttttaaaatgacaccaagggaaatctgcccatgagcagcattggatgggaccataccaggtgacttaaaattaaggataaccaaggaacaaagtctttcttagaagcagacatcatcacatggtagacagcttttttaagaaaatgggacaaaactccatttgatctccttccattgactgagacttggttttgttttgtattaacacaaagtgatcaagcctacattttattttgttacgtactttcaccagtcaaagcaaacactttctaagttctcctattcaaaatttagccattctcactaaccaaagcaattactggctatggagtcatttagatgaatgggaaggatcacaactaatagtagaacctgctctcacacacggttggttaatattgataattaaatgacttggcactgagcagaagctatagatgcaaatgggtggcctatgactattgttgatttcattacttgtaacttatctccatgcataggaaacattagtgtaaccgggtctaatctaggtagtgtcccagactccccctagaatcaaactctttcatttgacacacattatgaagactgaaatgctataagtattgacatagacacagaatcagaacatgaccatgttatcctctgccatataatcagagaacttactgaaactagacatttgttcattggaaactcgaggcaaatagaatgcatctatagctctactatatgaaataaacaatagtttcatttattggatgcatccatactcagcacatatttggagaagaccctattcattcttcaatggagatgacatgcaaggattatttaataaaattcataaaaatattttttcatcccaccccagttcaaactgtcaccatgcaacctggtgtcagtggaaggtaaggcgcttaaggcagaaataattaaataaatcttcattggaagctaaatgtgagaatcaatgtggaagacacagaccaacaaagtgggtgtgttccaaagtctgttacaagttggaatgcttttgtgagaaaagttaaaagaagggaatgagactcctcctatcagttttttttttttaattttcttttgttttactgacctggcaaggctcaaatagagttgagtttttgttttgtttttgttttttccattggaaggtacaatacagaggttacaatcattgactttagctgacaacataacaagttaaacattttccttgcaagacaaccagtgaaacttcatgatcagaatcaaatcagtgtccttctcactgtaagtgggtgaagcttcatcaataattgcagagtttgaggcactcatgaactcaagatcagattctttactcagggacagaatgtaagccaatcataagaccttccacaggtggttaatttggactcctgaaaaatgtgacctgtaagttttcactggcaatatgcaggtgcacatatgacaaataataaccaggacctttatatcacccccaactggtggggaatgggatccttttgaccctttctctccataataccaggctactcatcttgtgtggcaataaaatatatggtctacttcacagagaaagagattcttttaaaaaaaaaaaggatttttattatgaaatgagcaaagcaatgggaatagatgtgagattattcagggaggtaaaggaagacaaaggttttgaaaggaaaaatcaggagaattacatacactgttttggaagactcattcttggtcacaagtatcaacaccaagggggcctcagtgcaatgttggaaagattcctcctccacgccctcaataacccccaacatgtttaccaagtcttggttcactccccggatcccattaaaacacacagctcaaccctgaccagcctccaccttcacttccctttgtaattttgacatgactttttttacaggaccatcaggttcctatgcctgcagcacagtagcatactaatattctgagacagcagggtttgcagcagagagtttaacgatcacagggtggcaaaatgaaaagctgggaggagaccctcaaattcatctccccaagaagtactgagagttttcagaggatcatggatagcaagaggctggaaagttggtgcagtttggtggcagtaagaggtatgaagtcatcaggatgtcaaaactgcattccttggtgagttggtgccttgcagggcccttcagatcacctgccatcagtagcttcactgacatgcagaacctgaaagaatatgtcaaatgaaaaagttaatgttttacaaggcctaaattgttgtctgcagggcagttaagggcaactgtaatctaaggtctacatgattttgggacagcaggctgccagcaaccatgaggaagcaggtcagagagcaagctgacctcatgatgaatgctgaatgcactgcaagcttggtttatgtttgtttctccccctcccttcttcactgattaaatttataaagtttataagtatggttgcaatttcttccagagtagccttaacctaagccctgagaccactcaggtcctcagtggcacctctcttccaccagcaggagtgaaaaaattgctaccttaggtgatataaaacccacaagaccattgaatacatggagatttttattttgattttgtagggacgactcctctgtttttataaagctattttaactataaaacatttttgtgattttgatgtggccaaagatctcccaacaatactactttcagattttagttttctgtctaatatctgggaaagattagacccttccctgcttcagactcaggactatgcaggtcacatattagtgaaattccatcagtgtttgtgaagttcatgaatgaatgaattttttttttccgacaaattctccctctgtcacccagagtggagtgcaatggtgcaatcttggttcactgcaaccattgcctcttgggttcaagcgattctcccacctcagcctcctgagtagctggattacaggcatgtgccatcgtccctgtctaattcttgtatttttgtagagacggggtttcaccttgttggcctggctcgtcttgaatgtctgaactcaggtgacccacccaacttgtcctcccaaagtgctgggattacaggagtgagccaccttgcccggtcttgaatgaatgcattcttgattcccaccctatccctaacactgtcaatttcttgattcatgaacttaatatggatatctgatatgaatggatatctgattcaatccattaatctggggagagccaaaaccccaatcaggattaactgggtggagcttcagaaatgcaatcagatatcacttgttgattggaagctagcagtggatacgtggaggggtgtgggtgggagttgtgattagaaaggtcaataaaagcttctaaagacccacagaagagacccaaagtcttcaagcctggagttcctgcttagttcttcctgaggtctgagcaccctccaaactgagtccagatctggtaagtcactaatctctctgtaaggacactcccaactgacctacagtcagctggtctgggatggtgacagtgcagcctaagatggcatagagttatatcctgttttgttttttttctcatatgaacaatttgaagctttgcattttttcctttaaatgcagttttgtctttatttcaaaaaattggattgtgctttggtttatgtcatttcaaaattcttgaagggagcagtgactcatgcctttaaccccaacactttgggagaccaaggcgggaggatcatttcagcccaggggtctgagaccaacctggacaacacggcaaaaacccatctctataaaatattctttattgaaggggggatggagtctcgctctgtttccaaggctggagtgcagtggcacgatctcaaatcattgcaacttctgcctcccaggctcaagcaattctcatgcctcagcctcctgagtatctggtattacatccaactgccaacttgcctggctaatttttgtatttttagtagaggtggggtttcaccatgctggccaagttggtctcaaactcctgacctcaagtgatccacctgccttggcctcccaaagtgctggaattacagccctgagccactggtgcttggcctctacaaaatatacatattttttaattagccgggcatggtagcatgcatctgtcttcccaactgtatgggttgctgacatgggagaaacaattgagcccagaagattgaggctgcagtgagccatgctcataccactgctgtactccagcctgggcaacattgcgaggccctattacagaaaaaaaatcttaaccaaagaggatctttgaccttaattttaaaccaatcacatcctcattgtaactcttccacccaaacggagacatgggtgtggaggtgcatgcctgtaatcccagctacatggaaggctgaagcataagtatcacttgaacctgggaggcagaggttacagtgagctgagatggcaccactgtactccagcctgggtgatgaagtgagactcagctaccccgacacgaaaaaaattaaattataccacccaggtgatcattggattcatgaagatttctactgtgttttcttagggactgtcatgtctatctttgtaaaactgttttaactctgaaatattttgataaatttgatgtggccaaggatctctcaacaaagatactttcgagtttttttctttctgtctaatgtcaggaagagattcaactcttccctatctcacactcagaactacaaaggtcacatattactaaaattccatgtttgtggagtaaatcagtgaatgagtcctggactttcaccatatccctaaatatttcactttcatggatgaatatctaatttgatagttaatctggaagaaagacaaaaatccaatcatgattaactggatggagcttaagaagtctaatccaatgtagttctctctctctctctctcttttttgaatctagccaatttcccaggctggattgtagtggtataatctcagctaactgcaacctatgcctcctgggttcaagcgatcctcctgcttcagcctccctagtagcttggactataggcgcagaccactgcacctggctaatttttgtaattttagtagaggtagtgttttaccatgttggccaggatggtctcaaactcctgacctcagataatccaatgcctctgcctcccaaagtgctgggattacaggtgtgagtcactgcgcacagccaaagtggttcattttgaacatgcgtaagaggtgtgtattggaaacacctgtgtcttgcgaatgatgcataacactgtcacacagctttcaaagcttcttggtgaaattttcaataatgagtcccggaagaggattacgcctgtaatcccagtactttgggaggccaaggcgggtggaatgtttgagtctaggagttcaagaccagcctggacaacatagtgaaacccactgtctttacaaaaagtcaaaaaataaaagattagctgggcatgagatccgagcttcagagatcctcggtaacatttcccagtgctatgagtttattgcaacagtggctaataattcatggactaggaaggatcttgcctgctctttagaggttgggacacactcttcttggtaccagaagggcagaaccatgcctctgtagccacttattgcagaacggaattggagtaaactgagggctctttcacacgtgctagagaaatgactttggccctaggagaagtggggcttgctggggaatggcccgagaaacttgccttttcacttgattgtcctctagagtttttcctcggagatttgtcagaatgagcctccaggccccatccagactgctggagctggcagggcagagcctgctgaggaaccagttcttgaccatcttcaccctggatgagctgcccagggaggtcttccctctgatgttcatggaggccttcagcatgagacgttttgaggccctgaagctgatggtgcaggcctggcccttcctcagcctccctctgggatccctgatgaagacacttcatctggagaccttgcaagctgtcctgaggggacttgatacactggtggcccagaaggttcgccccaggtgaggtgactcaggtggctttcggggaagggtccaggcatccagggaagggacagctggctcaggaggagtggtggggttggggagctagggtggctcagaggcttctgacggtgcccatgagaggccttggccattgcccagatcctctggaaaaggtctgctcaccatacagggtccactgaggaaacaggagcttgtttcctcccagcagaaagtaaaggtactagaagtgggtaccaggcagaatccaagagggagcaggatggagaagagacagaaggaggagcactgaggacaggagcagctgactgatgtcctggatgtggagtgaaagctcaggtcaggggtgggtccttgcctacattctgagcttttcccctatgttactcacaggaggtggaaacttcaagtgctggatttgcgggatgttgatgagaatttctggaccatatggtctggagccagggtcctctcctgctccccagaggccatgagtaagaggcagacagtggaggactgtccaaggatgggagagcaccagcccttgaaggtgttcatagacctctgcctaaaggaaagtacactggatgaatgcctgagctacctttttgggtggatccactacagaagaggcctagtgcacctgtgttgtagtaaggtgcagaattactcaatgcccacttcaagtttcagaaatctattggaaaggatatacccagacagtatccaggagttggaagtctggaaaaagtgctctctcaataaaacgggaaagtttgccccttacctgagccagatgagcaatcttcgtgaactctttttagccttcggttatgagcgtgagttgtacgtgagcgtccagtggccgtgcattcctgacttggactctccattcctctgcctgtactacccccagatgctttatataaaaaagatcagtaatatcaaagagcacctggagcacctgctcaggtaagaaatgatggtgagctttctctgcagaccataccacagacttatgttctttttcacagtaaatgttagtgggcatctactgtgtgccagccaccggtgatgtcatagggaatgggacgctagaatgtcaactcattatgctcttcagtgctctatatcctgaaatgggtatcacaagaccactcaaataagggcagagggatggcctggggtagatgccacagagagaggtgtgtagggagccggttagttgagggttcagatctagtgagggtgcatttgtgaactccttgtgaggaacagtgtataaagttaatatgatgaaaacacattcttcatacagaggatggtatgaaagaagggaaggtgtggccggttgtggtgtctcatgcctgtaatcccagcacttcgggaggccaaggcagggagatcatgaggtcaggaatttgagaccagtctggccaacacagtgaatccccgtctctactaaaaatacaaaaaaaaatgtcaccgggcatgcagacaggcacctgtaatcccagctgcttgggagactgaggcaagggaagtggaggctgcagtgagctgagtcggtgccactacactccagcctaggttacaatgtgagactgtctcaaaaaaaaaaaaagagaaagtacatcaaacctgtgcattccacagtagcagctctgtcttcagcagcttagcaaactgctctaattccctgtctgtaaaacgttgttttgaactccaggaaagataattgatatcagaagtgcatgcttctgggatggagggtgagggactaggtgtgagagtggtaccaatcacacaggcaagggtgaaaggactgagcctaaaatggagctgcccctgaatgatctgagtcttcatcaggcagcaccttgcatgcagaccatcatctgatgatgggaacaaacttgtgtttgggtgaaacaggcttccccattgcagttactataacacctgtgtggtagtaaggtgcagaattactcaatgcccacttcaagtttaccattgagatgatttcccacccccctcctctaactggcaccattgcccataactaacttcttgctctccccaggtacctcaagaaccccttgggggcctttatattcagtgatgcttacctaactgatcgggacatggagtgtctgtctcagtacccaagcctcagtcagctaaaggagctgcgtctgattcatatcctaatgtggaccacccatcttgagccccttggagttctgctggagaaagttgctgctactctcaagaccctcgtcttaaaggactgtcggatccaggacccccaactcagggtcctcctgcctgccctgagccactgttcccagctcaccaccttcaactttcatggaaatgagacctccatgaatgctctgaaagacctgctgcgtcacacaggcgggctgagcaagttaggcctggagttgtatcctgcccctctggagagtcttgactacaagggtcatgtcaattgggagatcctcaccccaattcgggctgagctgatgcgtacactcagggaagtcaggcagcccaagaggatcttctttggtcccgtcccttgccctaactgtggctcatggccatctgagaaagtggacttccatctttgctcctagggaaggcctggttcgtgggatggataagctttcttctggacacttgggaactaaaatattgtacatgggtgcattttttaaaattttattttattttttatattttttattttattttatttttattttattttattttattttttgagacagagtctcactgtgtccctcaggatgaagtgcagtggcacaatctcagctcactgcaagcaccacctcctgggttcaagtgattctcctgcctcagcctcccaagtagctggtgttgtgggtgtatgcccccacgcccggctaatttttgtatttttagtagagacagggcttcacgatgttggcgaaggctgacctcaaactcctgacctcaagtgatctgaccaccttggccttccacagtgccaggtttacaggtgtgagcagcagggcccggtcagccgcttcttaaaggaagcacacagccacgtatttgaggcacgtgctcactgtgagtggaaaaacaaaggtgactcagccaggggcaggactgggtaaaaatgctgacttggcatcaatgaggccttcagggacctgtgtcctagacttagaaatggaacctgaagttctagagtgatgcaggacttacccctgcaaggatggttatttaaaaatgtcaaaaataaatggaacctgaatggaaactttctggtgtcttccatgattgatcaacctgttttagacatttatacatcagaagtctctagaaatctgcctcctgggttcaagcaattctcctgcctcagcctcctgagtagctggaactacagggacccgccaccatgcctggctattttttgtattttttgtagaaacgggggtttcaccatgttgaccaggctggtcttgaactcctgacttcaggcaaaccatccacctcagcctcccaaagtgctcagattgtagacattagtcactgcacctggcctgaaattctgatataagcataaaatgtgtaatgttcaaatcatggtaacaggaatagccaccatctcaagaatttatcatttctttgtgttagcaacattccaattccattgttttaattatgtagaaatttactatgaactattgtcaacacgagttgccctattgtgctactgaaccctagatcttattcctgtctgtgtttttgttcccattaaccatccccttcttattctctatttcccagtacccttcctagcttctgataaccgtcattttactatttttaagtttcgtgttttttaattcccaaatatgagtgcaaacatccatgtttgtctttctgtatctggcttacttcactcaacataacgccctccagttccatccatgttgtcgcagatgacaggatttccttcatgtttacagctcaatgatattctgttgtgtatatttaccacattttcttgatccattcatctgttgatggacacttatgttgattccaaattttggctattgtggatagtgctacaataaataggagagtgcaagctgagtgcagtggctcatgcctgtaatcccagaattttgggaggctgaggcaggtggattacttgaggtcaggagttcgagaccagcctgaccaacatggtagtgtagatatctcctggatatatttctttttttttttctggatatatatccagcagtgggatttatggtttatgtggtaatcctatttttattttttggaggaaactccatactgctttccttagtagctgtacgaatttacataactaccaatgttgtaccagggttctcatttctccatattcttcatagcatccattattttctgttggttttttatgggggagatccccttactattaaaactcaaatccagtttggtgtaaacacagaaaccctgctagagttgcctgccacccttgaaacaggccattggaatgaaaattgtccacctatgcaccaggtctgtattggacagaatgcttttgtcccagaggttgttcacaatagaggacatttcttttttgtttttctttacttttctgccttttttttttttttagggtagagtttcactattgttgcccaggctggagtgcaatggtgggatctcagctcactgcaacctccacctcccgagttcaagcgattctcttgcctcagcctcccaagtagctgggattacattcatgcaccaccacagctggctaattttgtgtttttagtagagacagggtttctccatgttggttaggctggtctcgaactcccaacctcaggttattccacaacctcagcctcccaaagtgctgggattataggcaggagccaccacatccagctagaggacatttctgatgtctccatattgatggaatttaaaataactctctggtaaattgttttctataatagccttaaataaaaatggagaaggtgagattaagatcattgcagacttaggtacagaattggtggaaaccagggctgccatatccagtatacagccaatatatcagcaaatcccttggagaaaggaaaatatttctgaggaggggtttcacatgaagttcagaaaattcctgtgtttgaagcagtccaaatgacatttggaccatttttaggaaagtatggctttttattaagtgacaacatggggatgagatttgctttctctgttaagttgatgcgtaaagctttctttggagggagagaaaaccctagagtttcctgaccttccttaacctgaactgcttggttccctagaagcagaaattgatcatattagaacccaaactcataccaaccttgaccttcatgaagtactcaagtgtttctgctcttcttcctcatgtgatgtagaaagtattaaaagtgatgagtttaggccgggcacggtggttcacgcctgtaatctcagcactttcagaggccgaggtgggtgcatcacctgtggtcaggagttccagaccagcctgggcaacatggtgaaactctgtctctactaaaaatacaaaaactagttgtgtgtggtggcctgtgcctgtaattccagctaactggaagactgaggcaggagaatcacttgaaccgggaggcagaggttgcagtgagccgagatcacaccattgcactccagcctggaaaacaagagtgaaactccatctcaaaaaaaaattaataaataaatacattataaataaataaattaattaatgctttaaagaaaaaagaaataaactttgcctacaaatttcatatgcaattgaatacctcttaaattttgatgtgaaccgaccaggcatggtggctgaggcctgtaatcccagcactttgggaggccaaggcagacagaccacgaagtcaggagattgagaacatcctagttaacatggtgaaaccccgtctttactaaaaatacaaaaaattagccaggtgtagtggcatgcacctgtagtcccggctatttaggaggctaaggcaggaaaattgcttgaaccggggaggcagaggtcgaagtgagctgagatcgtgccactgcattccagcctggtgacggagcgagactccatctcaaaaaataaatgaataaaataaataaatcaataaaaatattgtgacaggaaccaacattgctcaacttgtacactaatgtcttacaaaatcctttccttgtcaccttcaaatctccatttcaaatgctacactctgcataactctaccactttgttgccattttctgatgatggagaagaccatacatgtgtgtgtgtggcatcagaactattgactcctcctattgatgtttaagatattccattacacaaacctgggttcatactttttgttgatagatcttatgccaaaaatgtaggcaaaaaatgccaagcaggaaatgctatcacttctgaagatgaattcatagagatggaaattctttcagaatttatttttccagcttttttctttgtttgtttgttcgtttgtgtttgtttgttttgagacggagtctcgctctgtcaccaagttggagtgcagtggtgaaatcttggctgactgcaaccgcctcctcctgagttcaagcgactctcatgcctcagtctctcgagtagctaggacaatgggtgggcgccaccatgcccagctaatttttgtatttttagcagagacagggtttcaccatgttggctaggatggtctcaatttttggcatcgtgatctacctgccttggcctcctgaagtgctgggattagaggtgtgagccaccaccgtgcccggccatttttttttttttccttttgagatggagtctcactctattgcctgggctgggaaaggaactcctcctatcaattatttttttaaattttcttttgttttattgacctgacaagggtcaaatagagttgagtttttgtttttgttttttccattggaaggtacaaacagaggttacaatcattggctttagatgacaagataaaagaataaaacatattccttgcaagacaaccagcagaacttcatgatcagcatcaaatcagtgccttctcactgtcagtgggtggaagccttcatcaatacttgtagagtttaaagcactcatgaactcacgatcagactctttactcagggacaggatgtaagccaagcaaaagaccttccacaggtggtgaatttggaagcctgcccaatgtgacctgcaagttttcactggcaatatgcaggtgcagatatgacaaagaataaccatgacctttacatcacccccagctgttgaggaatgggatccttttgaccctttctgtccatagaaccaggttattcatcttgtgtggcaacaacatatatggtgtacttaacagaaaagaagactctgtaaaaaaaaaagtttattatgaagtaagcaaagaagtggcaatagatgcgagattatttggggagataaaggaagttgaaggttttgaaaggaaaaataaggaggattatacaaattgttttgaaagactcatacttggtcataaggattaaaaccaaaagggcatcagtgcaatgttagatagattcctcttacacccactcaataacccccaacatgttcagcaagtcttgcttcactcccaggttcccattaaaaacccagctcaaccctgaccagctccaccctcacttccatttgtaattttgacatgactttattacaggaccatcaggttcctatgcctgctgcacagtagcttagcaatattctgagacagcagggtttgcagcagagagtttaatgatcacaaggtggctgaatgagaagctaggaggagatcctcaaattcatctccccaaggagtactgaaggtttccagtggatcctggatagcaaggggccggaaagttggggtagtggtaagagggaagaagtcaacaggatgtagaaactgcattctttggtgagttggtgcattgcatggcccttcagatcagctggcatcagtagtttcactgacatgcagaacctgaaagaatatctcagatgaaaaagttaatgttttacaatgcttgaatcgttgtctgcagggaagttaaggggaactgtaatctaaggtctatatgattttggaacagtaggctgccagcaaccatgaggaaccaggtcagagagcaagaagacctcctgatgaatgctgaatgtgttgcaagcttggtttatttttctttctctccctcccttcttcactgattaaatttataaagtttatcgatgtggtttcaatttcttccaaagaagccttaacctaagcactgagaccactcacgccctcagtggcacctctcctccaccagaacgagcatgtaatctgctaccttaggttatataaaatcccaaagaccattcaatacattgagatttttattctgatatcgtagggatgactcctctgtttttataaagctttttaaagtagaaagcatttttatattttgatgtggccaaagatctcctaacaacactactttcagattttatttttctgtctaatgttgggaacagatcaaatccttccctgcctcacactcaagactatgaagttcacatattaataaaataccatcagtgtttgtggagttcatgaatgaatgatttttttattttttgacagaatctccctctgtcacccagactggagtgcagtggcacaaatctggctcactgcaaccattgcctcctgggttcaagcaattctcctgcctcagcctcccaagtagctgggtttcaggtgcctgccatcatgcccagctaatttttgtatttttgtagagacggggtttcacctttttgacctgactggtcttgaacccctgacatcaggtgatctactcaccttctccttccaaagtgctggaattacaggtatgagccacctcgcccacccttgaatgaatgtattcttgacttctaccctatccctaacactgtcaatttcttgcttcacgaactgaatacagatatgtgatatgaatggatatctgactcaatccattaatctggggaaagccaaaaacccaatcaggattaactgggtggagcttcacaaatgcaatcagatattgctttttgattggaagctagcagtgcatacgtggaggggcgtgggtgggagttgtgattagaaaggtcagtaaaagcttctaaggacccacaggagagacccaaagtcttcaagcctggagttcctgcttggttcttcctgagatctgagcaccttctagactacatccagatctggtaagtcactaatttctgtaaggacactcccatctgacctacagtcagtcggtctgggatggtgacagtgcagcctacgatggcacagagctatatcctgtcctttttttttttttttttttatatgaacaattggaagctttgaattttttcctctaaatgcagttctgtctttatttcaaaaaagttgattgtgctttggttgatgccattttaaaattcttgaagggagcagtgactcatgcctttaaccccaacactttgggaggccaaagtgggaggatcatttcagcccagggatttgagaccaacctggacaacatgacaaaaaccctcctctgcacaacgttttttttttgagggtggggatggagtctcactgtgttgcccagactggagtgcagtggcatgatctcaactccctgcaacctttacttcccgggttcaagcaattctcatgcctcagtctccatcctcagaagctggtgtcacagacatctgaaaccatgcctggctaacttttgtatttttagtagaggtggggtttcaccacgctggccaggttggtctcgaacacctgacctcaagtgatccacctgccttggcctcccaaagtgctgggattacagctgtgagtcaccatgcatctgtagtcccagctatttgggtggctggtgtgggagaatcacttgagcccagaagattgaggctgcagtgagccatgctcacaccactactgtactccagcctgggcaaaagagagacactctgtccaaaaacaaaaacaaaatcaatcaaaaaggatctttgaccttaattttaaaccaatcacatcctcttccacccaaatggaggcatggctgtggggggtgcatgcctgtagtcccagctatgtggaaggctgaagcatgagaattgcttgaatcttggaggcggaggtaacagtgagccatgatggtgccactgcactccagcctgggcgacgaagtgagactcagctccctcagcaccaaaaacaattatatgacccaggtgatcatcggatacatgaagatttctattgtgttttcttagggactgtcatctctgtctttgaaaactgttttaactctgaaatattttgataaatttgatgtggccaaggatccctcaacaaagatactttcaagttttctttctttctgtctaatatcaggaagagattcaacccttccctgtctcacactcaggactttgaaggacacatattagtaaaactccatgtttgtgaagggaatcagtgaatgagtcctggactttcaccctatccctaaatctttcattttgatggatcaatatctaattcgatcagttaatctttaagaaagccaaaaatccaataaggattaactgggtagagattaagaagtctagtcaaatgtagctctctctgtctctcagttcaatctagcctatttcccaggctggagtggagtggtataatgtcagctcactgcaacttctgcctcctgggttcaagtgatcctcctacctcagcctccctagtagcttggactacaggcgcagaccactgcacctggctaatttttgctgtcttagtagagtcagggttttaccatgttggccaggctcgtcttgaattcctgatctcagatgatccacctgcctcggcctcacaaaatgctcagattacaggtgtgagtcactgcacccagccaaagtggttcagtttgaacatgtgtaacaagtgtgcattggaaacatctatcttgagaatgatgcataacagtgtcacatagctttcaaagcttctcactgaaattttcaataatgaggctggggtggaggctcacacctataatcccagtatgttgggaggccaagaggggtagattgcttgagactaggagttcaagaccagcttggacaacatagcgaaatccactgtctttacaaaaagtcaaaaaataaaagatgagctgggtgtggtgatgcataactgtggtcccagctacttgggaggctgaggaggaagaatcctttgagctgggaggtcaaggctgcactgagctgggatcccaccactacactccaggctgggtgacacagcaagactctgtcagaaagagtgagagagggagagagagaaagagagagagaatgagagaagggaggcagggaaagaagacaagaaagaaaaaagggagagagagggggaaagaaagaaagaagggagggagagagggaaagaaggaaagaagaaagagagagaaagagaaagcaagcttaaataatgaaaagaaaacaaatagaacctgttctagggatgccccatgaatgttcccaacaagcttatttgtaggaactgaaaatgtgggcatgtaggcttgtgacattcccattcccattgttttagaaccttgagtaattagtagtttcccccaatggtaggaggggttcactttcaggttcctccacactcactagtcactggatggagcactggatagaaaggaagggctcgtggtggccctgcttcctcactgcttcggagacgctcatgctgatgcagcagaggcagaatgctggcttaatggccactgagtacagagtagaattggagtaaactgaggactctttcaccattgccagagcagtgagtttggccataggagaggatgagattgcatgggcttggcccgagagagatgccttttctctgggtttgtcctctggaagttttccctgcagattcatgaagatgagcatctggactccacccagactcctggagcttgcagggcggagcctgctaagggaccaagctttggccatgtccaccctggaggagctgcccacagaacttttccccccactgttcatggaggccttcagcaggagacgctgtgaggccctgaagctgatggtgcagtcctggcccttccgccgcctccctctgaggcctctgataaagatgccttgtctggaggccttccaagctgtgctcgatgggctggatgcactgcttaacctaggggttcgtcccaggtgaggtggcccaggtgggctggtggggagggcccaggtgtccaactgaaggaacagctgcgtcgtgagaagtgaggaggcccaagggggatggtggtggtgaggaagccgagaggacttggccattcaccagctcctcagggaaagcactgctcaccacgcaaggtccatggaggtaacaggaacctctcctctaatggcactgaaaggcaccatgaaaagtgagaactgggccgggcacggtggctcacaatgtattcccagcacattgggaggctgaggtcaagagttggaggccagcctgtccaacatggtaaaccccaactctactaaaaatactaaaattagctgggcatggtggtgggctcctgtaatcccagctacttgtgaggttgaagcaggagaatcatttgaatctgggaagcagaggttgcagtgaggtgacatcacaccactgcactctagcctgggcgacacagggagacttggtctcaaaaaaaaaacaaaacaatgtggaagtgggtaggatccaaggggaaaacagagtgaagaaaagtcagagagagggacaagaagcagggaggggaggagctgctatccaggatgtggagtttaagttcagaaatgagttctgaaattctcagtctcacctctattttcccacaggaggtggaaacttcaagtgctggatttacaggatgtctgtgagaacttctggatggtttggtctgaagctatggcccatgggtgcttcctcaatgccaagaggaacaaaaaaccagtggaggactgtccaaggatgagaggacggcagcccttgactgtgttcgtagaactttggctcaagaacaggactctggatgaatacctcacctgcctccttctatgggtcaagcagaggaaagatttactacacctgtgctgtaagaagctgaaaattttgggaatgcccttccgcaatatcagaagcatcctgaaaatggtgaacctagactgtatccaggaggtggaagtgaattgcaagtgggtactgcccatcctgacacagtttaccccatacctgggccacatgaggaatcttcagaaactcattctctcccacatggatgtctctcgctacgtttccccagagcagaagaaggagattgttacccagttcaccactcagttcctcaagctgcgctgcctccaaaagctttatatgaactctgtttctttcctcgaaggccacctggaccagctgctcaggtgagggagggtggtgagctttctctgcagaccacagcagagcctgttacagtaaacactagtgggcatctactgtgagccagcctatgaggatgaaacagtgaaggggacactagaatgtccatgcattgtcctgtgggcggccctgtcctgaaatgggtatcatgcaaccctcccaatagaggcagagggatcagctaggggagatgctatggagaggctgccatgctaggaagccagctactggggggttcagatctagtgagggtgcctttctgaattcttcctgaggacgtgtgtctaagttaagatgatgaaaaatacgccaggggcggtggctcatgcctgtaatcctatcactttgggagtctgaggcaagaggatagcttgagcctaggagtttaagaccagtctggctaacataccaagacccctgtcagaaatgaataaacaaaagtaaaaacaaacaagataactttttttttctgagatggagtttctctttgatcgtctaggctacagtgcagttgtgacatctcagctcgcagcaacttctgcctcccaggttcatgcgattctcctgcctcagcctcctgagtgcctgggattacaggcgtgagccaccacacctggctaatttttatattttaagtagagacagggtttcaccatgttggccaggttattctccaactcctgacttcaggtgatccacccaccatggactcccaaagtgctgggattataggcgagagctaccacgcccagccaacaagataatttttaagaagatgatgtgaagtagggaagtgaagtgggcactgaagaggggaatgttcagcaaacctgcacttgtcagaaaatcagctttgtgccccacagtttggtgaacatgaatgatcccatctctaattccctgttgtaaaagtttcttttgagctccaggtaaattaattatctaggcaatgcatgattctgaaacagagggtcagggtgcaggcacaaagaatggtgaaagtgatagatggtttgctgatgatacaggcatgtcagggatgcctgcagcccgcccaccgtagctgatgttgcaggatcctgtctgggtttgtcctttatgcctgaatctccactgggctcctgtggcccagggatgtggttttctgcctgacagatgaggaaagggagctttagggattctgtgaacttgatccattcctataaatgatggtgaagtgactcagcctcaaatggaattattttttctccttttttttttttaatacagagtctctctctgtcacccaggctggagtgtagtggcatgatctctgctcactgcaacctacacctcctgggttcaagcgattcttctgcctcagcttcccaagtagctggaattgcaggctccccccaccacacctggctaatttttggatttttagtagagaggaggttttgccatgttcagcaggctggtctcaaactcctgatctcaaggaatccaccagtctcagcctcccaaagtgctgggattacaggtgtgagttactgggccgggtctaaagtggaattgacctcggtggcaaagctcttcatcacacatcatcctaagtgttgaccatcaggccatcagaatgaccctggacttgggcaaaaaggtctccatccattaccttgaagccattccccaccaccctccactcacccctatgattccccagaattaacttcttgctctctctccccagctgtctgaagacctcgttaaagttcctcacaataactaactgtgtgcttttggaatcagacttgaagcatctatcccagtgcccgagtatcagtcaactaaagaccctggacctgagtggcatcagactgaccaattacagtcttgtgcctctccaaattctcctagaaaaagttgcagccacccttgagtacctggatttagatgactgtggcatcatagactcccaagtcaacgccatcttgcctgccctgagccgctgctttgagctcaacaccttcagcttctgtggaaatcccatctgcatggccaccctggagaacctgctgagccacacaatcatactcaaaaacttatgcgtggagctgtatcctgccccccgggagagttatggtgctgatggtactctctgctggagcagatttgctcaaattagggctgagctgatgaacagagtgagggacttaaggcaccccaagaggatcttgttctgtactgactactgccctgactgtggcaacaggtcattttatgacctggaggcagatcaatactgctgttgaatgcctgcctatttggatgggtatgtcaaacgctttcttctggacacttggaaactaaaacctaggtcttaggtacatcctaaagggagcacagaacccatcatttcacacataggctctgaaagtgggaaaggaaagctgatcaagcaggggccggacttgggggaaatgttgccatggattcgatgggactttggggacctgtgtcctgtagagtcgaaaatgggaatctgaatgtctagagtggaattcaggcttgagaatacatgagggagttactcttgcatggatggttgtaaagaaacaatcagaaataaaggaaaactgagcagaatctgtctggtgccctctattattaagtaacctgttttccagtttaagcctcaggaatcttcagttattgatggaaaaaacaaaaggcactgactgagttgtccaatcaataagatgcagcccaagaaaatcaaggcatttaaatgaaatttggttattgtaatcagtttcctcccattcttttattggagacagagtttcactcttgttgcccaggctggagtttagagtgcaatggtgccatctgagctgactgcaacctccacctggggtttaaatgattcttctgcctcagcctcccaagtagctgggattacaagcatgcaccaccatgcccagctaatttgtgtatgtttagtagagacagggtttcctcactatgttggtcaggctggtctcaaactcctgactttgggtgattcatgcaagtaggcctaccaaagtgctggggttacaggtgtgagccactgtgtcaggcttttttgtttgtttgttttttaaaggtctcctgtcactcaggctacagtgcagtggcacaatcatacctcactgcaacctcaatttccggggttcaagcgatccacccacctcagcctcctgagtagctatgactacagctgtgtgagccaccacacctggatacttctttttagtagagacaaggcctcgctgtcttccccaggctgatctggaactcctgagcttgtgattctcctgccttggcctcccaaaatgcagggagtataggcgtggaccaccacgcttggcttggcctcctccagttcttcacttctttagatgtctgttaactccttgttagtttctgtggctgttcagtgggttaatacacactaggtggacaccaaaggcctggaacattactgggcaagaacagtgagccaatccacacggaaagcaccttcttctcagggtctttcaccgctatccagatgctgagaccctgcccactccctgtgagtctccacatgcttccagaagccttagttggtggatgtcagcttcactgcacaaggagccactctcttcccgctgccctggaaggggatgtccatattgtgtattagctggagactctgggcagcatcaacccttgcttgttctcctgatgaccagcagcccttcttgaattaaactggttgtagccagtaaagacagccacattccctttaagtaaaatactaaaactatacaggcatgtaacactttttaaatatttccatctgacattttaaaagttacatcttttgggggagctaggtcagattgatgagagattttctcataacacctcccctctctccctatgaaggaagagactagtgcagcgtgttctggaatctgacagcatcaaagggtggataacgatcaagggcctgtgggtgatgagtgaccttccctgtgctgaggaattctgcataatgggcacccaagtgaaggatcctgctgagtactcaggggctggtgttgctgtcagggatgttagcctagagcctcagcttcctgtaaaatgaggatgatgatgtccaacagcttatgggaccttggtaggatccaatgagatggttcatgtttagggcttggcatggggtctggcatacagtaagatcaatacatcttgttcttttttctcttctcagcagaagtcccagcacttttcatctttcaatctcacctccttttcctgataatagagaggcaacaagaactcagggcatgcaatggggctcaacttctactctctgccacaatttcatcatgattgccccaaagagcagagccccaggagccagcagggggcagggtgggcatttctggactggattcattcataataagatcaaaatttccaatccgtatgtctcgggtgccatctgctgatagatccgaccagatggtataattgagtgttgcaaggattatattttatggtgtttttaaaaatgtactattatgagccaggtgcagtgagtcatacctgtaattccagcactttgggaggctgaggcaggtggatcacctgaggttgggagtttgagaccagcctgagcaacatgaagaaaacccttctctacttaaaatacaaaaaattagccaggcgtggtggcgcacgtctgtaattgcagctactcgataggctgaggcgggagaatcatttgaacctggaggtggaggttgtggtgagctcagactgagccattgcactccagcctgggcaaccctagcaaaactccgtctcaaaaaaaaagataaaataagatttattattatggccgggcatggtgtctcacacctctaatcccagcactttgggaggccaaggcagcctcaggattttgagaccagcctggccaacatggtgaaaccccatctctactaaaaatacacaaaatttgctgggagtggtggcattcgcctgtaatcccaggtattcaggaggctgaggcaggacaatcacttgaacccgggaggtgagggttgcaatgagacgagatggcaccacttcactccagcctgggcgacagagcatgaaaaaaaatttactataatgtgaatactattagagtataaatatttgtgttgtaatttatgtatatgaaagattagaacttttaaagaatgcaacgtgatatttcaagaatggttaatggccaggtgtggtggttcatgcctgtattcctggcactttgggaggccgaggtgggcagatcacgaggtcaggagttccagaccagcctggccaacatgatgaaaccccgtctctacgaaaaatacaaaaaattagcctggcgtggtgacaggtgcctgtaatcccagatagtcaggaggctgaggcaagagaatcgcttgaacctgcgaggcaaaggttgcagtgagccaagaatgcaccactgcactccagcctgggtgaaagaggaagactccgtctcaaggagggtgagaaaaagaatacttaacttggtttgaaatgtcaaaacaaatgagattttaaaaactaattttaaagacactgaacaataatcatttcttctttaaaatatatttagaataatacaattttagctttgaaaggaaacattacagttttaaaaaatattgagtttattttattttattttattttattttatttggagacaaagtctcactctgttgtccagattggagtgcagtggcatgatcacggcttactgcagccttgacctcctaggctcaggtgatctccctgcctcagtccccctagtagctggaacaacaggcatgcaccatcatgcctgacttatttttgtattcttagtgaagaccaggcttcaccatgttgcccagactggtcttgaaattctgggctcaagcgatccacctgcctcggcctcctaaattgctgggagtgagttcctataggcatgagccaccgcacccagccttgagtttatttatttatttattttggagatggagtctccttctgtcatccgtgctggagtgcagaggtacgatctctgttcactgcaacttctgcctccaggattccagcaatgctcctgtctcagcctccagagtagctgggattacaggcatgcaacaccacacctgattaatttttgtattattattattatcagtttttagtagagacagggttttgtcattttagctaggctggtctggaacccctgatctcaggtgatccacctgcctcggcttcccaaaatgctatgactatagacgtgagccaccacacccagcctattttttcctttacagcagttttagattcacagaaaaactaagcagaaactgcagagttctcatctaccttcttcccccttcaatacacagcacccccacaggatcagcacccacaccagcacagagcattcatcacaaccaatgagccacagggacacatcattatcacccaatgtccatagttcacatgagggatcattgctggttttgtacattctatggattttaacaaagggataatgacatgtatccaccattagagcatcatggagagtagttttctttccctaaaattcctctgtcctcttcccattcatcccattgtgctcccaaccccttgcatccactgggctttctactgtctccttagaaaaatgcaaaagctttttctggaatgtctaacaggatgagtcttttcagattgccttctttcacttgtacaataacgtgcatttaggaatttttcatgtctttttacagctttataatagttcactgactggatggatcagtttgcttatccagtcactgaccgaagggcaacttgctagcttccaagttttggcgattatgagtaagttgctgtaaacatccaggtgtgggtttactcacttcattaaatatccaggagcatgattacggaattgtaggggtatggtatgttttacaatgatttcttctttcttgacaatctcacttgttcgatattgctgctaaaggtcaggaactttgtctccatcatcctgtgttcccactgctgagcatggaacgtggcacttggtagcaaatgctgttgaccacgtgatgcatggaaacgtttatcatgggtatagtcactaaattgctaccttggggacatcaacattagctcactaccaataatataaataaattggattatggaaaaaaatggcccttgtgatactgtggatactccaggtgtatcatgaacgtccagcaattgaccaggcacagtggctcacatctgtaatcccagcacttgcagagactgaggtgggtggatcacttcagtcaggagttcaagacgactctggccaatatgatgaaaccctgtctctattaaagacacaaaaattaactagggggttgagccaagatggccgaataggaacagctccagtctacagctcccagcctgagcggtgcagaagacgggtgatttctgcatttccaactgaggtaccaggttcttctcactggggagtgtcagaaagtgggtgtaagacagtgggtgcagtgcaccgagcatgagccaaagcagcgtgaggcattgcctctcctgggaagtgcaaggagtcagggaattccctttcctagtcaaagaaaggggtgacagatggcacctgtaaaatccggtcactcccaccctaatactgcacttttccaacagtcttagcaaatggcacaccaggagattatatctcgtgtctggctcaaaaggtcctatgcccacggagcctcactcattgctagcacagcagtctgagatcaaactgcaaggcggcagcaaggctgggggaggggcgcctgccattgttgaggcttgagtaggtaaacaaagcagccaggaagctggaactgggtggagcccactgcagctcaaggaggcctgcctgcctctgcagactccatttctgggggcagggcattgccaaacaaaaggcagcagaatcctctgtagacttaaatgtccctgtctgacagctttgaagagagtagtggttctcccagcacgcagctggagatctgagaatggacagactgactcctcaagtgggtctgtgacccctaagtagcctaactgggaggcacccaccagcaggggcagactgacacctcacatggccaggtactcctctgagacaaaacttccacaggaatgatcgggcagcaacatttgttgttcaccaatatccactgttctgcagcctctgctgctgatacccaggcaaacagcttctggagtggacctccagcaaactccaacagacctgcagctgagggtcctgactgttagaaggaaaactaacaaacagaaaggacatccacaccaaaacccagtctgtacatcagcatcatcaaagaccaaaggtagataaaaccacaaagatggggaaaaagcagagcagaaaaatgggaaactctaaaaatcagagttcctctcctcctccaaaggaacgcagctcctcaccagcaatggaacaaagctagagggagaaggactttgatgagttgagagatgaaggcttcagatgatcaaactactctgagctaaaagaggaagttcgaacccatggcaaagaagtcaaaaacattgaaaaaaaattagatgaatggctaactaaaataaccaatgcagagaagtccttgaaggacctgatggagctgaaaaccatggcacaagaaccacgtgacaaatgtacaagcctcagtagctgattccatcaactggaagaaagggtatcagtgaaggaagatcaaacgaatgaaatgaagcgagaagagaagttcagagataaaagaataagaggaaatgaacaaagcctccaagaaatatgggactatgtgaaaagaccaagtctatgtctgacaggtgtacctgaaagtgatggggagaatggaaccaagctggaaaacactcttcaggatattatccagcagaacttccccaatctagcaaggcaggcaaacattcaaattcaggaaatacacagaatgccacaaagatactccttgagaagagcgactccaagacacataattgtcagattcaccaaagttgaaatgaaggaaaaaatgttaagggcaaccagagagaaaggtcgggttacccacaaagggaagcccatcagactgacagcggagctctcggcagaaactctacaagctagaagagagtgggggcctatattcaacattcttaagaaaagaattttcgacccagaatttcatatgcaaccaaactaagcttcataagtgaaggagaaataaattcctttacagacaagcaaatgctgagagattttgtcaccaccaggcctgccctataagagctcctgaaggaagcactaaacatggaaaggaacaactggtaccagccacttcaaaaacatgccaaattggaaggaccatcgatactaggaagaaactgcatcaactaaagagcaaaataaccagctaacatcataatgacaggatcaaattcacacataacaatattaaccttaaatgtaaatgggctaaatgctccaattaaaaaacacagactggcaaatttcataaagagtcaagacccatcagtgtgctgtattcaggaaacccatctcacatgcagagacacacataggctcaaaataaagggatggaggaagatcttccaagcaaatggaaaacacaaaaaggcaggagttgccatcctagtctcggataaaacagactttaaaccaacaaagatcaaaagagacaaagaaggccattacatcatggtaaagggatccattcaacaagaagagctaactatcctaaatatagatgcacccaatacaggagcacccagattcataaagcaagtccttagagacctacaaagagacttagactcccacacaataataatgggagacttcaacaccccactgtcaacattagacacatcaatgagacagaaagttaacaaggatatacaggaattgaactcagctctgtgccaagcggacctaatagacatctacagaactcacaatccaaaatcaacagaatatacattcttctcagcaccacactgcacttattccaaaaattgaccacatagttggaagtaaagcacacctcagcaaatgtaagagaacagaaattataacaaactgtctctcagaccacagtgcaatcaaactagaactcaggattaagaaactcactcagtgtgtgatgttccctttcctgtgtccatgtgttctcattgttcaattcccacctatgagcgagaacatgcagtgtttggttttttgtgcttgtgatagtttgctgagaatgatggttcccagcttcatctatgtccctacaaaggacatgaactcatcattttttatggctgcataggataccattaggaggtatacctaaggctaaatgacgagttaatgtgtgcagcacaccaacatggcacacgtatacatatgtaacaaacctgcacgttgttcacatgtaccctaaaacttaaagcataataataataataaaagaaactcactcaaaaccgctcaactacatggaaattgaacaacctgctcctgaatgactactgggtacataacgaaatgaagacagaaataaagacattctttgaaaccaatgagaaaaaagacacaacataccagaatctctgggacacattcaaagcagtgtgtagagggaaatttatagcactaaatgcccacaagagaaagcaggaaagatctaaaattgacaaccgaacatcacaattaaaagaactagagaagcaagagcaaacacatccaaaagccagcagaaagcaagaaatagctaagatcagagcagacccaaaggaaatagagacacaaaaaccccttcaaaaaatcaatgaatccggtagctggttttttgaaaagatcaacaaaattgatagactgctagcaagactaataaagaagaaaagatagaagaatcaaatagatgcaataaaaaatgataaagggcatatcaccacggatcccacagaaagacaaactaccatcagagaatactataaacaactctatgcaaataaactagaaaatctagaagaaatggataaattcctcaacacatacaccctccccagaataaaccaggaagaaggtgaatctctgaatagaccaataacaggctctgaaattgaggcaataattaatagcttaccaaccaaaaaaagtccaggaccagatggattcacagtcgaattctatcagaggtacaaggaggagctggtaccattccttctgaaactattccacttaatagaaaaagagggaatcctccctaactcattttatgaggccagcatcatcctgacaccaaagcctcgcagagacgcaacaaaaaaagagaatttgagaccaatatccctgattaacatcaatgcaaaaatcctcaataaaatactggcaaaccgaatccagcagcacatcaaaaagtttatcctccaatatcaagtcggcttcatccctgatccgcaaggctggttccacttacgcaaatcaataaacgtaatccatcacataaacagaaccaatgacaaaaaccacatgattatttcaatatgtgcagaaaaggcctttgataaaattcaacaccctttcaggctaaaaactctagataaactaggtattgatggaacgtatgtaaaaataataagagccatttatgacaaaaccacaaccaatatcatactgaatgggcaaaagctagaagcattccctttgaaaaccagcacaatgcatggatgccctctctcaccactcctattcaacatagtattggaagttctggccagggcaatcaggcaagagaaagaaataaagagtattcaaataggaagagaggaagtcaaattgtctctgtttgcagatgatatgattgtatatttagaaaaccccatcgtctcagcccaaaatctcctaaagctgataagcaacttcaacaaagtctcaggatacaaaatcaatgtgcaaaaatcaaaatcattcctatacatcaacaatagacaaacggagagccaatcatgagtgaactcccattcacaattgctaaaagaaaataaaatacataggaatacaacttacaaggggtgtgaaggacctcttcaaggagaactacaaaccactgcttaaggaaataagagaggacactaacacatggaaaaacattccatgctcatgggtctgaagaatcaatatcatgaaaatggccatactgcccaaagtgatttatagatccaatgctatccccatcaagctgtaatggagtttcttcacagaattagaaaaaactacttaaaacttcatatggaagcaaaaaagaacctgtatacacaacacaatcctaagcaaaaagaacaaagctggaggcatcacgctacctgacttcaaactatacgacaaggctacagtaaccagaacaacatggtacagttatcaaaacagatatgtagaccaatggaacagaaaagaggactcagaaataatgccacacatctacaaccatctgatccttgacaaacctgacaaaaacagccaatggggaaaggattccctatttaataaacggtgttgggaaaactggctagccatatgcagaaaactgaaactgaaccccttcctttcaccttatacaaaaattaactcaagatggattaaagacttaaatgtaaggcctaaagccattaaaaatcctagaagaatacctaggtgataccattcaggacataggcatgggcaaagacttcatggctaaaacactaaaaccaatggcaacaaaagccaaaattgacaaatgggatctaattaaaataaagagcttttgcacagcaaaagaaactatcatcagagtcaacaggcaacctatagaatgggaaaattttttgcaatctatccatcagacaaatggctaatatccagaatctacaaggaacttaagcaaatttacaagaaaaaaacaaacaaccctgtcaaaaagtgggtgaaggatactaacagacaactctccaaaaaaaccatttatccagccaacaaacatatgaaaaaatgttcatcaccactggtcatttgatttgcatttctctaatgcaaatcaaaaccacagtgagataccatctcatgccagttagaatggtgatcattaaaaagtcaggaaacaacagatgctggaaaggatgtggagaaataggaatgctttgacactgttggtgggagtgtaaattagttcaaccattgtggaagacagtgtggcaattcctcaaggatctagaaccagaaataccatttgatccagcaatcccattactgggtatatatccaaaggattataaatccttctactataaagacacatgcacaagtatgtttattgcagcactattcacaacagcaaagacttggaaccaacccaaatgcccatcaatgatagactggataaagcaaatgtggcacatatacatcatggaatactatgcagtcataaaaaataagttcatttcctttgcagggacatggatgaagctagaaaccatcattctcagcaaactaacacaggaacagtaaaccaaaacaccacataagtgggagttgaacaatgagaactcatggtcacaggtaggggaacattacacatcagggcctctcggggtgtggagggctaggagaggggtagcattaggggaaatacctaatgtagatgacgggttgatgggtgcagcaaaccaccatggcatgtgtatacgtatgtaacaaaactgcacgttctgcacatgtatcccagaacttaaagtggaaagaaagaaagaaagaaagaaagaaagaaagaaagaaagaaagaaagaaagaaagaaagaaagaaagaaagaaagaaagaaagagagaaagaaagaaagatggaaggaaggaaggaaggaaggaaagaaagaaagagaaagtaagaaagaaagaaagaaagaaagaaagaaagaaagaaagaaagaagaaagaaagagagaaagaaagaaagatggaaggaaggaaggaaggaaagaaagaaagagaaagtaagaaagaaagaaagaaaaaagaaagaaagaaagaaagaaagaaagaaagaaagaaagaaagaaagaaagaaagaaagaaagaaagaaagaaagaaaagacaagacagtggaggggaggggaggggagaggaggtgaagggaagggaagggaagggaagggagaagaaaagaaatacccataaaataggaaagctggctggtcacaggagaagcatgaaaatatcaagcagtgatttcatatagcagcaagaaaagagcctgtaaaattagctgcaagaataagaataagccttgacccataagatccaaacaagctggaaggggctaagctggctaacactgaattggtcagacatggcactgggtttgacccttgccctaccccaggcctaattatacacctattatgacagtaagtcacacaccagcgccaggacggttctgagaatgcccatatttagtataaaaatagttaacacctagccacgtgcagtggctcatgcctgtaatcccaacattttgggaaactgaggcaggcggataacctggtgtcgggagattgagaccaccctgaccaacatggagaaatctcgtctctcctaaaaatacaaaattagccgagtgtggtggtgcatgtctgtaaccccagctactccagaggctgaggcaggagtattgcttgaacacgggaggcggagattgcagtgagccaagatcgcgccattgcactccagcctgggcaacaagagcgaaactccatctcaaaacataaataaataaataaataaataaataaatgacacctcagttctaagaaaacttcaccattttttcttaaaatcctaatgattatttcaacctctccttacagatcctataaaattagaaacccaaactctcttgtacctgactcgctctcctgaataagccctctcttgagtgtgttcctttgctttgcaatagacacttcttgccttttgcttcattctgcctacttcctaaactctttcttgcagcggtgacaagaatgtggacactggttggtgattgagtctctgggcacctggagacgacctaagcactatggcaatagtcagtctaaaaatcacacaggatatcacaattcactctctggttttcttgggggaaaaatccagtaactttggccccatatccccaaggggcatcactcagcacaaactgagaagcagcagtcctaccgctgggttgtaagtatgtggctttattccggggttctctattccattccattggtctatgtctcgaccttcatactggtaccacgcagttttgcttactattgccttactgtataaattgaagtcaggtaatgtgatgcctccatatttgttcattttgcttcggattgctttggctcttcagcctctttttcatctccatatgaatcttaggattctttttttaatcttgtgaaaatggtgtttgtattttggtgtatgaaatttttagactgacgtttttagattgatgtttgatgtttgcaggttttagattgctttgggcagtgtggtgattttcacaacattgtgtctgtcaatccatgagcatgggatatttttctacttttttgttgtctatgatttttttcagcagtgtcttgtagttcatctcatagagatcctttacctaatggttaagtgtattcctaggttgtttttgttattgtcactgtttttgttgttgttttgcaactattgtgaagggatggagttcttgaattgattctcagcttgcttgttgttgatatcaaacagtggtactgatttgtacatattaattttgtacctgagatttaagtgaattcacttatcacatctacgagtcttggtggaatctttccggttttctaagcacatatgatcacatcattggcaaacacaggtagtttcacttccttctttccaatttaattatactttattccttttgcttaccagattgctctgacaaacattttcagtcctatgttgattgcaagtggataaagtgagcatttttgtctgcttgtagttcctagcaggaatactttcaacgtttcttcattcaatatgatgttgcatgtggatttatttttggcttctattattttgatgtatgttctttctaggcatagtttgtgtaagcgtagtctattattttacaagctcagatttgtattctgttttacctgagtgcattgtgagatttggcatctattttacctgatataagtacagctactcttgctgtttttggtttccagttgcatggaatatcttattctaccccatcactttccatctacatgtatgcttataggtgaattgagtttctggaaaacagcatatagtagggtcgtatttttttactcattcaaagaccctttgcctttcacttgcagaattcagataaattatattcattgtttttattgataaaagcttagtgctcccatttcattccttgttttttggttgtttagagacttctctcttccatccttttcttattgtctttctttgtgtttaagtaattttctcttctggaatacttggaatgtgactcttctggccagaaacctctgtggctgggggcacctttgccagagttttgatggggttcactgggttcgttctgcccatgcagcctggtagactatgcttggctcatgtttcaggcctggagcacatgcctattaagggcgggtcagggctggagtggtgaggggtgtgtgagtgagcagggggtctggccactttggacggtcaccggctgctgctgctgcagcagtgggatgggcagctccagatgccagcatgtgtgccagatttctgcaaggctgcaaatgaatcaggcacagcacaaacagcttccatggttgtcactggaatacacagtgacaccaacactgaaagcttggaaatgccaggaactgcagaacccccaaaagggagtcacagccctggctcaggaagctcccacatctgggctcctggaagagtagttgctcttctctttttctcttcacctacaatttggtgagcaaggggcatgtttcagctttatttgtgttattgctcttttaccccaccattaggcgggtctcaagtttttgtcctgtgaccaggaagagtgaaatatgcagacaagtggagggtgagtgagataaagaagagctttattgagcaatagaacagcttagagacccacagtgggtaacttctttctgcagccagggcgtcctgatgagtgtttagctctgagcagagaggaggccctggggtgggtgacccctccctcctggcaggttattccatcatcaccactgctctcagtagagagaaggccctggagtgggttgctgctctctgcaggaaagtcatctcatcatctctacagctctcagcagagaaaaggacccggagggggttgcttgtctctacaggaaaatcatcccaacagtgggtagttcctctctgccactggtcttcctaatgttctccctgagtctggggtttttttgacatcagacaggagaaagtatgcactcattgggtcataggtggccatgagcaggcacagaaaaggcaacacatgttcccactctggtccataggactggtggcccagcccacgggcttcagaccctccttgatcagaaggtggagcttcaccagtgaccctcaccttcctgtccaggattctgtctgcttcccaccaccaaccatggagcccaggtcacttgtaccaaggagcatccaaagaccagtgctgatcagtccgcaacacccctcagcctccctcctacactcatcaaggcccaaagtccagagggttcaagacagcagtgggatggtgcatcagcactgacccgagtgtgcacagacccacctgggctgtgacagcatctgggcttgaccacaaccacactccaaaattagagcaggtgccatgagagatgaggcagtgagagcggacacccccaagctgcaggagaaggggggatctcctggaccctcgagagtactgggggacctcatttggtaactgtgacctggacaacttcagttgcgtctttggagctactgccctgccaactcaggaggaccaggactccctcttgtcccaggctcccatcagctctgaagtgtacgcagccttggctgtgccctctctctgtgtttccctgcagaagtgacagttgagaagcaggtacacagcagctctggccaaccccacacaaacaaacccaatgctcctgggtgtggtttaaccagccccaactgcactatcatccaggagcttgcaggctaacggcaggcagtgagcagtgaagtagaggctgtggtggagactccagacctgggacaaggttccattttgcaatgagagggtgtgggtggcacagtaggctgcctcagggaaatggagcacaggcctggctcatgaccctgtcaaggggggtgcctccaggagtggttcatagttcccaggcccagcaatcgggctggtcactcctatggggggcggatctcggaaacacagcatggggtggatccgcatagaccctcccttcaagacctgggagcttgacactgttagcaggatgggcacagtggccagatagctggccaggtccttgaaacaggtgccatttctgcttctcaccctggccccctgatggatggccccagctatgccttctgggcctggcatccgcacatcttgtgcgaacgtggcaccaccccattcctatcttctccttggggcccctctctgcccgtcccttcgcgcctgaccgagctgctccccttgggcaaaaaagtaagaaaaaaactgatgactgaagagaagtaaagaatgggtggaaatcatctgtatgcctgttttcccagcgctttgggaggccaaggtcagtggatcactcaaagccaggatcttgagaccaggctgatcaacatggaaaaacctcatctccattaaaaatacaaaaatcagccagtcttggtgaaacgtgcctgccgtcccagctaattgagtggttgaggcacaagaatcacttgagccctgaaggaaaggattgcaatgagcccagattgcaccactgcactccagcctaaatgacaaactgagattttgtctccaaaacaaaacaaagaacaagaatgggtgggaaatacttaaaatgatcaaattttatttggttgctttgatgttctacagctgaaactcaatcacagacaaagtagtatttcattatttttccatcagtaactcaataactagatatttctggtggataaattgctacaacacgttaaaagttttcattcaggtgctctttatttctgatattccttggtaaccatccttgcagggataacattctcatcactgtagaactttagcttctctttccgactctgtaggacacgggtccctgaagttctcattgatgtcacctcaacattttcctccagccttgccccctgctgttatgttttctctctcacactgagcacttgcctgtgcttcctttaagttgcatgtggcctggacacagtcactcatgccagtaatcccagcactttaggaagctgaggcaggaggatcccagagcaacacagagaaaccctgtctcaaattgtctttaataaaaattttggaattattaaaaaatgaaataaataagaaaagagaaaaatagtttgcacctacatagtagattttagtgtccaagtgcctggaagagaactttggatttctctaccccactgggcacgccttccctagcagcaaagatggagctccagttcctcagacggtgatgagccacaggaagggcagggggtggggccaatgaagatcctcttgggctgcctgaattccctcagtgtacacatcagctcagcccgaagtggggtgaagatctcccaattgacacgaaccaaggaattcaaactctcctcaggggcaggatacgtctccaggcttaacttgctcagcccactggtgtggcgcagcaggtccttcagggcgtcaatagacatgcaattgctgccaaagtagaaggtggtgagctgggagcagcagctcaggccaggcaggatggcactgagttgggagtagtggatctgacagccctctaacacgagggtctcgagagaggcagcaattttctctagcagagctcctaggggttcaagactgatgcggaacagcagcacgtagctgagattcagatgctttaggtaaccgaggcttgggaactgggagagacacttcaagtcctcttctaataggttgccacaagttaattccaagttctccaaggggttctggaggcacctgtggagatcaagaagttagttctgggcaatggtaccagttagatgaaggtagtggggaataacctcaaggaaaatacctgcttcaaccaaacacaagtttgttcccaccatctgatgatggtcctcatggaagttgctgcatgatgaggaccctgatcgttcaggggctgtcccattttagcctcagccctttcaccattgcttgtgtgattgggtcaaggccataaaatctctaaagcctttttgtttttcatcttttagcagaaaacttcatctctgggctacaggtaccccgtgggagatgtgaacaaagaactcaactcagcaaggtctagggacatcagctagggctacatgtcggcaggggctccctgacatgcctgcatctgcaaaccaactgtcactttttaccactctcacgcctactccctcacctccatcccggaagcacgcatttcccatgtcaattacctttcctggagttcaaaacaacgttttgcagacagggaattaaagacaggatcattcgtgatcactaagccggtgaggacagacgttctattgtgaaatggacaggtttgatgcgctttccctcctttcataccctcctctattatctctttgacatcatatcaacttgaaacacactttgtaacaggaaattcacacgtgcacccccaatagagctgaaacccccactgactagcttgtacatgatgtccctctctagcttctaccccaggtgacccctctgcccttattggagcgatcctgtgatagccactccaggacatggaacactgaatgggacaatgtgttgacattctggtgttcccttcactgtgacgttgccactggctggcacacagtacacgccttctaatgtttgctgtaacagaacaagtctgtgctgtggtctgcatacaaagtgcacaatcctttctcacctgatcagctgttccaggtgcccactgaagaaggtgatcaattttattttaagcaactggaggtgttccagcctgaggaacacagaggtgaatctggtgactaaccatccctcgagttcattatctgacgtgtaatgatggcacctggagaaaacgagtttgcaaagagtcttcatctccttcaggtaacaataaagctttcttatcagatgtggccagcacgtgttgtgaatttccagctccccaatactattaatgtatattattttcaatgactttctgagatatttaattggcgttagataattgaccagcttactacagcacaggtgtactaaacctctcctttggtaaacccactggaagaggtatctcaggcattcatcctggggtatttccttgaggcagatgtctatgaacacctttaagggctggtgctctcccgtccttggacagtcctctgctgtctgcctcttactcatggcctctgggaagcaggacagggcccaggctccaggccatctggcccagaaattctcatcaacatcccgcaaatccagcacttgaagtttccacctcctgtgggtaaagtaagggagaggctcagaatttagagggactcatccctgacctttgctttcattctcatcccataaatcagctgctcctgtcctcagtgctccctgttctctttgtcttttctcaatcccttttccctttggattctgagtggtccccacttctattccctttaccttccactgagtaaaggccggtttctgttcccacagtggaccctgtatggtgagcagtcctttctctgaggatctggacaatggccaaagcctccctgagcttcctcgccaacaccatcagaagactctgggccgcacttgggttacttctctgcctgaccctgctgttctttccctggacacctgagccctatctactagccctcctgggtcacctcacctggggcgatccttctgtgtaagcagcatatgaagcccttccagcaatgctttcaatggctccagatgaagcgtcttcatcagcgataccagagggaggcaggtgaaaggccaggcctgcaccatcaccgtcagagtctggaagtgtctcctgctgaaggcctccctgaagagtgggagatagagcaccctgggcagctcctccatggcagagatggacaaggcctggtctctcagcaggctctgccccgccagctccagtagtctcggtggggcctggatgctcatcctgatggatctgcaagaaaaatctctagaagacaaatccagggagaatgtatcactctcagggcaaacacaatcacctcatcttctcctaggaccaatatcattgctctggtagaggtagaaaaattaccactttaccccaattccactgtgcttgttggcctcaaatctatacttctgcttctgctggtaccaggaagaatatcttccaaacaccaaggagggaggggtcaaagagaccattgacccattaattttcatccttcgctccactgaatcccagaaccactggacagtgccactgaggatcctgaaagccaagctctacctctttgaggaaaaatttcttgtcacttaccaccctaaagcattgagaatgagagtgtcccgtgggcccagacagcctccattctcagttcacaccatgaacatgctgggggaacactaaagggactccctaaaatcgatgccattattttttattttgaaaattttctaccagaaatggaccaggtgctgtggcttatgtctgtaatcccaacactgctggacaccaaggcaggcagatcacttgaggtcaggagttcgagaacagcctgggcctacataatgaaaccatgtctctactaaatatacaaaagttaagaatcatttgactccagaaggcagaggtttcagtgagccgacatcacaccactgcactccagcctgggtgacagcgttggactctgactcaaaaataaacaaattgataaattaattaatttaaatattagccaggtgtggtcatgcatgactgtaatcctagctactctggaggcagaggaaggagaatcacttgaagcccagagacagagtttccagggagcccagctcagggccctgcactccagtctgggtgacgcactcagagtacatcgcagaaaaaaacaaaataattcactggaactgtaaaagtggtgtgatggtattccacagcatttggaaggtatgtatagaaatgctaactgtagctgggcatgctggcttactcctgtaatcccagcactttgggagtctgaggggggcagatctcctgaggtcaggagtttgaggccagcatggccaacatggcaaaaccctgtgtctactaaaaatacaaaaattagctgggcatggtggtgagtgcctgtaatccaagctactcaggaggctgaagcaggagaatcacatgtaactaggaggcagaaatttcagtgagccaaaccacaccatggcactccagcctgggcaacaatagggaaactccatctcaaaaaaaaaatcaaccagaaactgtaaaagtgctaccatgctattctagagcactgtaactctaagatgaaggttcctatagacatcacttccacatactcacaattacccactttttgatggatcgatcctagggtcaaaaataaatcccacaatctgagcaaaactgcactcttgagattggtgtgtgggatacctttaaggattttatgaaaatgaaagcatacttggaggatcacaataacaccaagtctatgaactgtaattgaaaggcacaaaaacaaataacttcaaatgtcaagaaataaaaattcatgtcactgtaaagttttaatatatttttaaaaaacctgcttccataagaattttaaaatgacaaaaaccaagcacaaatcacaatctgatggatgaagacaaaactacatttagaggaaaaatgaaagcctaaatctgttcatctcacaaaacagacagaaaaatattgtgtgccactttgggatgtgtgtcaccgtccctgactggctggctgctgatcagatgggcatgaccctaagaaggtggtgacttaccagcgctggactcactttgcagagttctgggacctctcagggaaccaaccagtagcttcaggtgtgagtgctgtgggtctcttctgggtaccctcaggagcttttatagacctttctaaccccacccttcccttctcaatcaccagcttccaatcagaaagtgatacctgattagatcttgcagtcacacccagttaatcctgattgagttttcagctttcttctgactaattgatcgaattagatacacatttatggaagtaaaagaataaataatagggtgaaagtccaaaactcattcattcatttattccccaaatactgatgaagtttggctaatagatgactttcatagtgatacagggaagggattaatctgttcctgatatcagacaaaaaaaaaaaaaaaaaccttaaggtgtccttattggaggatgtttggccacatcaaaattgtcaaaatgtttcagagctacaacagcctgaagaagatagtgatgtcattcccaagaaaacagaataaaaagctgtgtatatcgaatggttacctgtgttttatgctatctaacatagcagatcatatgcacattcaggtagaagaaaggaaccactgagggtgtgatctatctcaagactaagtcaaggcttcactgaaggaaatcaggacaaaatgaccaagtgaggtgcggactgagtggaatgagactaggttttctaatgggaacctgcaaaggaaacaagacaatgtaaaacatggtggttatcttgtgggcatctagatgtcaggactgaaagtcctttgtcaagattgagtttatttattgattctttgattttcagactgggccaccatctgtcacccaggctggagtgcagtggcatgatttcagctcactgcaacctcaactttctgggttcaagcgattttctcaccttgcctcccgagtagctgggaattatgggtgcgctccaacatgccccactaatttttgtatttttagttgagatggggtttcaccatgttggcccggctggtctcgaactcttgacctcaagtgatctccccacctcagcctcccaaagtgctaggattacaggcatcagccatctcacacaccctagattgagttcagaaattcaaaggagaatcatcaaaagagataggtcagactcttaaccataacattggctttgagaacacagggggcaggtatagtcttggccctactagaaggtaaagggtgtttacccacaaaaatgatgggctcctctcagaaaaccagcttgcaaagatggaatctgagaatgtgagctggagcagaggccagagagaagatcggggccacacttgggaagggaaagcaagcaagctcaggcctccaatcccagccctttgggaagccaagaaaggcagagtgctagagctcaggaatttgtgaggagtatgggcaatgtgatgaaaccctgtctctaatacaaatacaagatattagccagggggaggcagtgtgcacctgtaggccaagctgcccaagaagttgaggtgggaggatcacctgagcccagtgaggcttctacttcccacgccccactttgtaaacctgaggctgagggtgagctcagcaccaataatggttgtgagaatctgtgttcactgagcatccacgaggcacaacagatggctggtaccgatcatcccggacctcagctcttcctcatggagaatctaaggcacgttgctattttccccatttctaacctgataaacctgagacttggccagagaaaaatctgcccatgttctggcagcaaatgattggcaaacaggcatgagccaccacggtcagccagaaaaaagtacttaataaattaccagctaactaaatgcaacactgcatcagaaagtgatagacaggccaggctccgtggctcatgcctgcaatcccagcactttgagaggctgaggcaggtggatcacctcaggtctggagttcgagaccagcctgaccaacatggagaaaccccatccctactaaaaatacaaaattagccaggtgtggtggcgcatgcctgtaatcccagcaactcaggaggctgaggctggagattcgcttgaaccaagaaggtggaggttgcagtgagtcgagatcgtgccattgcacttcggcttgggcaacaagagtgaaactccagctcaaaaaaaaaaaaaaaagaaagaaagaaaacaatatagtaatatataatggccattccaggaatgccagccaatcacagaaaaatctaagtgtaattcagcatactgacaaactaaagggggaaaagcaaggttcctacaaaatgcagaaaggaattgaagaaaaatcaaattaaatttatcatagcatattttggaaaatgagatgttgtatgttgaaaacttgcattaaacatcagatgtaatggataaacattagctcccttcctagtgagatatgaaacaaggtaagaccctcagcaacttaggatttgaaggcacgtaggtattttggttagtagtaaagactccagatccagcagatccagactgtttaatttaggttcaaaactggctcagtaccatcctggctaacacggtgaatccccatctctactaaaaatacaaaaattagccagacatggtggcaggcacctgtagtcccagctactcgggaggctgaggcaggagaatggagtgaacccgggaggcagagcttgcagtgagccgagatcgcgccactgcactccagcctgggcgacagcacgagactccatcccagaaaaaaaaaactggctcagtggccaatggctgtgtggtcttacccaacttacttaacctctctgtgccttagctcattcacatataaaatgggataatagcaatattgacttcacagagtgttataagttaatctatttaagtacttcgagctggatttgacatagggcaagcaaggatatttttattgttattatatttgaaaaatatattagttacaaacttaggtgagagaccaaggtctatggtaaaggtgattataagccttcatacacccctgttgttctgaaaatcttaattataacaaggcccggtggagtggctcacgtctgtaatcccagcactttgggaggctgaggtgggcggatcacctgaggtgaggtgggcggatcacctgaggtcaggagttcgagaccagcctcaccaaagtggcaaaactatctctctattaaaatacaaaaaatagctgggcatggtggtggacacctgtaatcccaggtactcggtaggctgaggcaggagaatcacttgaatccaggaggcagagtttgcagtgaaccaagatggaactattgctctccagcctggcgacggagtgagactccatctccaaaaaaaaataattaattataacagcatgtccattcactctccaaagtgtctaggactggacaattaattgtcaggccctcttctgtagcaccctacactatagcatatatgtggattaatataaatacacatacaaatttcaagtatatattccatatactttctatatacttattttctaagaggtcacatgcaaattcaaggctatgtcaaagagtagagtggctatctatggaaaggggagtggaagtgaatcatggtaataaaaaataggtgtagatatagatatgaatatgtagacatacacacatatagcggcaagaaaagggaatgtcatggaccaatgatgacagtgagccatgtaaaaaggctacaatttttgtgattgtgtgtccattttcaggatgggttgtagcttacctttttagaaaggctgatgccatagtcatagtgaataaatgattataaaatgtgtttcctttctggtgcacctctggagaaacttgacacagagtctctgatgcccaagctggagtacagtggtgctatctcggctcactgcaacctctgcctcctgggttcaagtaattctcatgcctcagcctcccaagtagctgggattacaggcatgccaccacacccagctaatttttgtatttttagtagataatggggtttcaccatgttgcccaggctggtcaactcctggcttcaagtgttccgccagcctcagcctcccaaagtgctgagattacaggtgtgagccaccacgcccagtaagactggcttactttaatataatttttaccacccctatgggaaaatacagccagacccatcataaggtattttttttcaccaactacaatcagaagcaccgatcataaagtatttactggagaacctatgcctttgataatagaacctcatgtatcccctgcacattttagctctgactgtgtaaccaggggttcaactccaacagattaaccattgcttaagttgcaaagcctaaattgctcaggcatgtccgatgggaaaaaggtttaacctcttaactgttaacacagcctggctgactgtttgaattggcatcacctgaaaccagttggaaaggccatgtgagcttgctccactatccccagattggggagacaggcttggaacttgtctcctgtctccctgtcagttaactattttttatttttatttttatttttatttttttctttgagacagagtcttgctctgttgcccaggctggagtgcagttgcgtgatctcagctcactgcaaacttggccttccgggttcaagtgattcctgcctcagcctccacagtagatgggattacaggcgtgcaccacgatgcctgactaatttttgtatttttagtagagagggagtttcaccatattggtcatcctggtctggaactcctgaccttgtgatctgcccgcctcggcctcctaaagtgctgggattacaggcatgagccattgtgcccggcccagttaactcctaataattttttattttttcccaaaatggagtcttgccctgtcacccaggctggactgcagaggtgcaatctcagctcactgcaacctctgcctcccaggatcatgccattcttctgactcagcctccagagtagctgggattacaggcatggatcaccacacccagctaatttgtgtatttttagtagagacagggttttcccatgttgtccaggcggtctcaaacccctgaccttgtgatctgactccctcggcctcctaaagtgctggtattataggcatgagccaccgtgcccagccttttttgcttttctcaaaccatggtggtgtagtattgggttctatgcacttaggagagtgagctcatcattcagtaacaatatgactcagtaccacgagacctttcaaagactatttccagtaggtgaaggaggcttttaatgatgattggaccttcatgccctaccatttggagattgtgtcttttaaaatggccctaagggaaatctgcccatgagcagcattggatgagaccataccaggtgacttaaaattaaggataaccaaggaaaaaagcctttcttacaagcagacatcatcacatggtagacagctgttttaagaaaatggaacaaaactccattctatctccttccattgactgagacttggttttgttttgtactaacacaaaatgatcaagcctacattttattttgttacgtactttcaccagtcaaagcaaacactttctaaggtctcctcttcaaaatttagccactatcactaaccaaagcaattgctgcctatggagtcatttagatgaataggaaggatcacaactaatagtagaacctgctctcacacacggttgggtaatatttatgattaaatgactcggcactgagaagaagctatagatgcaaatgggtggcctatgactattattgatttcattactggtaacttatctctatgcataggaaacattagtgtaactgggtctaatctaggtggtgtcccagactcttgtggctcaggctggagtgcaatggcacaatctcagcccactgcaacctccacctcccgggttcaagtgattctactgtctcagcctcccaagtagcagggattacaggcatgtgccactacagccagctaattttgtatttttagtagagacatggtttctctgtgttggtcaggctggtctccaacacccaacctcaggttatcctccggccttggcctcccaaagtgataggattacaggcacgagccaccgaacctggatagagaacatttctgatggctccatattgatggaacttcaaataactctctggtaaattattttctataatacccttaaataaaaaatggagaagctgagatccagatcaatgtagactttggtacagagttggtggtaccagggctgccatatccagtttacaccccaacctgatatatcagcaaatctcctggagtaaggaaaatatttctgaggaggggtttcacatgaaattcagaaaattcctgtgtttgaagcagtccaaatgacattttgtggcaacaaaatatatggtctacttaacagagaaggagactgtgtaagaaaaaaaaaaaaaagatgtttatcctgaaatgagcaaagcattgggaatggatgtgagattattttgggagaaaaatagaagatgaaggttttgaaaggaaaaataaggaggattatataaattgttttgaaaggctcatccttggtcctaataatcaaaaccaaaggggcatcagtgaaatattggatagattcctcctccaccccctcagtaacccccaacatgtttaccaagtcttggttcactcccaggatcccattaaaacaccaagctcaaccaagcccatcctctaccctcacttccttttgcaattttgacatgattttattacaggaccatcagattcctatgcctgctgcacagtagcttaccaatattttgagacagcagagtttgcagcagagagtttaatgatcacagggtggctaaatgagaagctaggaggagatcctcaaattcatctccccaaggaggagatccactgagggtttccagtggatcctggatagcaaggggctggaaagttgatatagagttaagagggatgaagtcatcaggatgtcaaaactgcattctttggtgcgttggtgccttgtagggcccttcagatcagctggcatcagtactttcactgacatgcagaacgtaagaatatctcaaatgaaaaagttaatgttttacaaggcttaaattgttgtctgcagggcagttaaggggaactgtaatctaaggtctaaatgatttggggacagtaggctgccagcaaccatgaggaagaaggtcagagagcaagctgacctcatggtgaatgctgaatgcgctgcaagcttggtttatttttgtttctccccctcccttcttcactgattaaatttataaagtttataggtatcgtttcaatttcttccaaagaagccttaacctaagcactgagaccactcacgccctgagtggcacctctcttccaccagcacgagtgaagaaactgctaccttaggtgatataaaacccacaagaccattccatacatggagatctttattcttattttgtagggatgactccgtttttataaagttgttttaactagaaagcatttttataattttgatgtggccaaagatctccccacaacactactttcaggttttatttttctgtctaatgtccggaacagatcaaccccttccctgcctcacactcaggacctgaaggcgacatagcagtaaaattccatcagtgtttgtggatttcatgaatgaatgcattttttttttgacaaaatctccctccgtcacccagtcaggagggcaatggtgtaatcttggctcactgcaaactcagcctccagggttcaagggattctcccacctcagccacatgagtagctggactacaggcagccaccatcgtgcctggctaacttttctatttttgtagagacagggtttcaccatgtgggccaggcgggtcttgaactcctgacatcaggtgatccacctaccttggcctcctaaagtgctgggattacaggtgtgagccacctcatctggccttgagtgaatgaattcttgacttccactctatccctaacgctgtcaatttcttaattcatgaaatgaatatgcatatgtgatatgaatggatacctggttcaatccattagtcttcggacagccaaaaacccaatcaggattaactgagtggagcttcagaaatgcaatcagatatcgctttttgattggaagctagcagcggatatgtggaggggcgtgggtgggagttgtgattagaaaggtcaataaaagcttctaaagacccacaggacagactcaaagtcttcaagcctggagttcctgcttggctcttcctgaggtctgagctacaactacaaccagaggtctaaactacaaccagatctggtaagtcactaatttctggaaggacactcccatctgacctacagtcagccggtctagaacggtgacagtgcagcctacgacggcacagaactatatcctgtctttttttctttttttcatatgaacactttgaagctttgattttttttctaaatgcaattttgtctttatttcaaaaatgttgttgtgcttttctttacatcatttcagaattcttgttgggagccattttgtgaagagacgaagactgagctggtttggctgcatttctggcctcgagccgcagtcagtttctccccgtagaacccggcagtaggagacttagaatcgaatctcttctccctcccgcctcctgtttttggctttttgagaaaccttatcatccaacacaatggccagcaacgttaccaacaagatggatcctcactccatgaactcccgtgtgttcattgggaatctcaacactcttgttgtcaagaaatcggatgtggaggcgatcttttccaagtatggcaaaattgcgggctgctctgttcataagggctttgccttcgttcaatatgataaggagaaaaatgcccgggctgctgtagcaggagaggatggcagaatgattgctagccaggttgtagatattaacctggctgcagagccaaaagtgaaccgaggaaacgcaggtgtgaaacgatcagcagcggagatgtacggctcctcttttgacttggactatggctttcaacgggattattatgatggaatgtacagtttcccagcacgtgtacctcctcctcctcccattgctctggctgtagtgccctcgaaacgtcaacgtctatcaggaaacacctcacgaaggggcaaaagtggcttcaattctaagagtggaaagcggggatcttccaagtctggaaagttgaaaggtgatgaccttcaggccattaagcaggagttgacccagataaaacagaaagtggattctctcctggaaaacctggaaaaaattgaaaaggaacagagcaaacaagaggtagaggtgaaaaatgctaagtcagaagaggagcagagcagtagctccatgaagaaagatgagactcatgtgaagatggagtctgaggggggtgcagaagactctgctgaggagggggacccactggatgatgatgttaatgaagatcagggggatgaccagctggagttgatcaaggatgatgaaaaagaggctgaggaaggagaggatgacagagacagcaccaatggccaggatgactcttaagcacatagtggggttgagaaatcttatcccattgtttctttacctaggagcttgtctaacaacaaatttttcaccagatcctctcccttagtatcttcagcacatgcttactgttctccccatctttgtccttcccatgttcattaattcatattgccctgtgcctagtcccattttcacttcccttgacacccctagtagttgtcctaagtcttaccctgtaatttttccttttaattttgacacctctttatgacttaacagtaaaaaggatgtatggtttttatcaactgtctccaaaataatttcttattttgtttatttagtttatttatttgttagtttagtttagttttgtttatttgttatttagtttactgagaatgatgttttccaatttcatccatgtccctacaaaggacatgaactcatcattttttatggctgcatagtattccatggtgtatatgtgccacattttcttaatccagtctatcattgttggacatttgggttggttccaagtctttcctattgtcaataatgccgcaataaacatacatgtgcatgtgtctttatagcagcatgatttatagtcctttgggtatatacccagtaatgggatggctgggtcaaatggtatttccagttctagatccctgaggaatcgccacactgacttccacaatggttgaactagtttacagtcccaccaacagtgtaaaagtgttcctatttctccacatcctcttcagcacctgttgtttcctgactttttaatgattgccattctaactggtgtgagatggtatctcattgtggttttgatttgcatttctctgatggccagtgatgatgagcattttttcatgtgttttttggctgcataaatgtcttcttttaagaagtgtctgttcatgtcctttgcccactttttgatggggttgtttgtttttttcttgtaaatttgtttgagttcattgtagattctggatattagccctttgtcagatgagtaggttgtgaaaattttctcccattttgtaggttgcctgttcactctgatggtagtttcttttgctgtgcagaagctctttagtttaattagatcccatttgtcaattttgtcttttgttgcaagttggaatgcttttataagaaaggttgaaagaaggggatgggactcctcctatcagttgttttttttttaattttcttttgttttatcctggcaaggctctaatagagttgagcttttttgtttttgttttttccattggaagggacaatacagaggttacaatcattgactttagatgacaacatgacaggcaaaaatattttccttgcaagacaaccagcaaaacttcacgatcagaatcaaatcagtgtccttctcactgtcactgggtgaagccttcatcagtacttgaagagtctcaggcactcatgaagtcaagatcagattctttactcagggacaggatgtaagccaatcataagaccttccacagatgatcaatttggaagtctacctaatgtgacctgcaggttttcactggcaatatgcaggtgcagatatgacaaagaataatcctgaccttcatatcacccctagctgttgaggattgggattcttttgtccctttctctccataaaaccaggctactcatcttgtgtggcaacaaaatatatggtctacttaacagagaaagagactccacaggaaaaaaaaaaaaggatttttattatgaaatgagcaaagccatgggaatagatgtgagattattcggggaggtaaaggaagacaaaggttttgaaaggaaaaatgaggagaattacataaatttttttgaaagactcattcttggtcacaagtatgaaaaccaagggaccctcagtgcaatgttggaaagattcctcctccaccctctcaataacccccaacacatttaccaagtcttcgttcactcccaggattccattaaaacacccagctcaaccctgaccagcctccattttcacttccctttataattttgacataaatttgttacaggaccatcaggttcctatgcctgctgcacagtagcttaccaatattctgagacagcagggtttgcagcagaaagtttaatgatcacagggtggctgaatgagaagctgggaggagatcctcaaattcatctccccaaggagtactgagggtttccagtggatcctggatagcaaggggctggaaagttggtgtagtttgatggcaataagaggtatgaagttatcacgatgtcagaacggcattctttggtgagttgatgccttgcagggcccttcagatcagctggcatcagtagtttcactgacatgcagaacctgaaagaatatctcagatgaaaaagtgaatgtttcacaatgcttaaattgttgtctgcagcgtagttaaggggaattgtagtctaagttctacatgattttgggacagtaggctgccaggaaccatgaggaagcaggtcagagggcaagctgacctcctggtgaatgctgaatgcgctgcaagcttggtttgtttttgttcctccccctctctttttcactgattaaatttataaagtttagagatacggtttcaatttcttccagacaagccttaacctaagccctgagaccactcaagccctcagtggcacctctcttccaccagcgtgagcaaataaattgctaccttaggtgatatagaacccacaagaccattcgatacatggagattttttttctgattttgtagggatgacttctctgtttttataaagctgttttaactataaaacaattttataattttaatgtggccaaagatctcccaacactactttcaggttttatttttctgtctactatccggaacagatcaaacccttccctgcctcaaactcaggactatataggtcatatatcagtaaaattccatcagtgtttgtggagtttatgaatgaatgaattctttttatttttatttttttgacaaagtctacctctgtcacccagaacggtgtgcaatggtgcaatcttggctcactgcaaccattgcctccgggattcaagcgattctcccacctcagcctcctgagtagctggattacaggcacctgccatcatgccaggctaatttttgtgtttttgtagaaatggggtttcaccatgttggccttgcaggtcttgatcgcctgacctcaggcgatccagccaacttggactctcaaagtgcagggattacaggtgtgacccacctcacccggcctttaatgagtgaattcttgatttccaacctattcctaacactgtcaatttcttgattcatgaacttaatatggatagctgatatgaatgaatatctgattcaatccagtaatctggggacagccaaaaacccaatcaagattaactgggtggagcttcagaaatgcaatcagatagcactttttgattggaagcaagcactggatacatggaggggtgtgggtgggagttgtgattagaaagatcaataaaagtttctgaagacccacaggagagacccaaagtcttcaagtctggagttcctgcttggttcttcctgaggtctaagcatgctgcaaactcagtccagatctagtaagtcactcatttctggaaggacactcccatctgacctatagtcagtcggtctgggacagggacagtgcagcctatgatggcaccaagctatatctgtcttttatatatatatatgaacaatttgaagatttgaattttttcctctatatgcagttttgtctttatttcaaaaaattggattgtgctttggtttatgtcatttcaaaattcttgatgagagcaatgactcatgcccataacctcaacaccttgggaggccaaagcgggaggatcatttgagctcagcggtttgagaccaacctgggcaacatggcaaaaacgcagctctacaaaacattctttttttgaagcagggatggagcctcaccctgttgccaaggctggagtgcagtggcaagagctcaactcactgcaacctcttcctcccaggctcaaacaattttcatgcctcagcttcctgagtagctggtattacatccctctgccaccatgcctgcttaatttttgtatttttagtagtggtggggtttcaccatgctggccaggttggtctcaaactcctgacatcaagtgatcctcctgcctcagccccccaaagtgctggaatgacagccttgagccaatggtggtcagcctctacaaaatatatatatcttttaatttgccaggcatggtagcatgcgtctgtattcccagctatttggtttgctgacatgggagaatcacttgagcccagaagattgaggctgcagtgagccatgctcacaccactgctgtactccagcctgggcaacagagtaagaccctgctaaaaacaaaaacaaaacaaaaacaaacaaacaaaaaaccttaaccaaagagaatctttgaccttaattttaaaccaatcacatcctcactgtaattcttcctcccgaatggagacatgggtgtgggggtgcatgcctgtaatcccagctacgtggaaggttgaagcatgagaattgcttgaatctcagaggcggaagttacagtgagctgagatggagccgctgcactccagcctgggcgacaaagtgagattcagcttcacccacaccaaaaaaaatgagattataccacccaggtgatcattggatacatgaagatttctattgtgttttcttggggactgtcaactccgtctttgaaaactgttttaactctgaaaaattttgataaatttgatgtggccaaggatccctcaacaaagatactttcaagttttctttctttctatctaatatcaggaagagattcaacccttccctatctcacactcaggactatgaaggacacatattagtaaacctccatgtttgtggagggaatcagtgaatgagtcctggactttcaccctatccctaaatctttcactctgatggatgaatatctaattcaatcagttaatctggaagaaagccaaaaatccaatcaggattaactgggtagagtttaagaagtcgaatcaaatgtagttctctctcttttctttttttttttttctttgaatctagcctatttcccaggctggagtgcagtggagtattgtcagctcactgcgacctctgcctcctgggttcaagcgagcctcctgcatcagcctccctagtagcttggattataggcacagacaactgcaccttgctaatttttctaattttggtagaggtagggttttaccatgttggccaggctggtctcaaactcctgacctcggataatccacctgcctctgcctcccagagtgctgggattacaggtgtgagtcactgcacacagccaaagtggttcattttgaatatgtgtgagaggtgtgtattggaaacatctgtgtcttgccaatgatgcataacactgtcacatagctttcaaagcttctcgctgaaattttcaataatgagaccaggcagaggctcatgcctgcaatcccagcactttgggaggccaaagtgggtggattgtttgagtctaggagttcaagaccagcctggacaacatagtgaaacccactgtctttacaaaaagtcaaaaaataaaagattagctgggtacgagatctgagcttcagagatcctcggtaacatttgccagtgctatgagtttagtggatcagtggctaataattcatggactacgagggatcttgcctgctctttagaagttgggacacattcttcatggtaccagaagggtagaactgtgtctctgtggccacttattgcagaaaggaactggagtaaactaagggctctttcacacacgctagagaaatgactttggccctgggagaattgggggttgcaggggattggtctgaggaacttgcctttttgctggattgtgctgtagagtttttccttgtagatttgtcagaatgagcctccagaccccatccagactcctggagctggcagggcagagcctgctgaggaaccagttcttgactatcttcaccctggatgagctgcccagggaggtctcccctctgttcatggaggccttcagcatgagatgttgtgaggccctgaagctgatggtgcaggcctggccctcccttcacctccctctgggatccctgatgaagacacctcatctggagaccttgcaagctgtgctgaagggacttgatacactagtgtcccagaaggtttgccccagttgaggtgactcaggtggcctggtgggaagggtccagacatccagggaagggacagctggctcaggaggagtggcagtgtgtgggagctagggtggctcagaggcttctgatggtgcccatgagaagccttggccattgcccagatcctctggaaaaggactgcttaccatacagggtccactgaggaaacaggaacctgcttcctcccagtggaaggtaaaggtactagaagtgggtaccatgcagaatccaagggggaacaggatggagaaaagacagaaggaggagcactgggacaggagcagctgactcatgtcctggatgcggagtgaaagttcaggtcaagggtcggtccttgcctacattctgagcttttcccttatgttactcacaggaggtggaaacttcaagtgctggatttgagggatgttgatgagaatttctggaccatatggtctggagtcagggtcctcccctgctccccagaggccatgagtaagaggcagacagtggagaactgtccaaggatgggagagtgccagcccttgaaggtgttcatagacctctgcctgaaggaaagtacactgcatgaatgcctgagctacctctgaaggtggatccactacagaagaggcctagtgcacctgtgttgtagtaaggtgcagaattactcaatgcccacttcaagtttcagaaatctattggaaaggatatacccagatagtatccaggagttggaagtctggaaaaagtgctctctcaataaaacgggaaagtttgccccttacctgagccagatgagcaatctttgcaaactttttagccttcggttatgagcctgaattatacgtgagcggccaatggcagttcattcctgacttggattggccattcctgtgcctgtactacccccagatgcattatataagaaaggtcagtaatatcaaagagcacctggagcacctgctcaggtaggaaacgatggtgggctttctgtgcagaccataacacagacttttgttctttttcacagtaaatgttagtgggcatctactgtgtgccatccactgaggatgtcacagggaatgggatgctagaatgtcaactcattaagctgttcagtgctctatatcctgaagttggtatcacaagaccactcaaataagggcagagggatggcctggggtagatgctacagagagagatgtatagggagctagttagttggggattcacatctagtgaaggggcatttgtgaattcctccttaggaagtgtgtataaagttaatatgatgaaaacgtattcttcataaagaagagggtatgaaagaagggaaagtgcagtctggtgtgatgtctcatgcctgtaatcccaggactttggaaggctgaggcaggcagatcacgaggtcaggagtttcagaccaccctgaccaacacagtgaatccctatctctattaaaaatacaaaatttagctgagcatggtgccaggcacctgtaatcccagctacttgggaggctgaggcaagggaagtgaaggctgcagtgagctgagattgtgccactgtaatccagcctaagttacaatgtgagactctgtgtcaaaaaaaaaaaaagaaaagaaaagaaaaagaagaagggaaagtgcatgaaacctgtgcatttcacagtagaagctccgtcctcagcagcttaataaacaccaatgatcctgtctgtaattccttgtctgtgaaaggttgttttgaactccaggaaaggtaattgatacgggaagtgcatgcttctgggatggagggtgagggagtaggtgtgagagtggtaccaatcacacaagcgaggctgaaaggactgagcctaaaatggagctgcccctgaatgatctgagtcttcatcaggcagcaccttgcatgcagaccatcatctggtgatgggaacaaacttgtgtttgggtgaaacaggcttccccattgcagttactataacacctgtgtggtagtaaggtgcagaattactcaatgcccacttcaagtttaccattgagatgatttcccacccccctcctctaactggcaccattgcccataactaacttcttgctctccccaggtacctcaagaaccccttgggggcctttacattcagtgatgcttacctagctgatcgggacatggagtgtctgtctcagtacccaagcctcagtcagctaaaggagctgcgtctgattcatatcctaatgtggaccacccatcttgagccccttggagttctgctggagaaagttgctgctactctcaagaccctcgtcttagaggactgtcggatccaggccccccaactcagggtccccctgcctgccctgagccactgttcccagctcaccaccttctactttcatggaaatgagacctccacgaatgctctgaaagacctgctgcgtcacacaggcgggctgagcaagttaggcctggacatggatcctgcccctctggagtgtcttgacaacaggggtcatgccaattgggagatcctcaccccaattagggctgagctgatgcgtacactcagggaagtcaggcagaacaggaggatcttctttttttttttttttttttttttttttgagacggagtctcgctctgtcgcccaggctggagtgcagtggcacaatctcggctcactgcaagctccgcctcccgggttcacgccattctcctgcctcagcctcccaagtagctgggactacaggcgcccgccactacgcccggctaattttttgtatttttagtagagacggggtttcaccgttttagccgggatggtctcgatctcctgacctcgtgatccgcccgccttggcctcaggaggatcttcttcggtcccaccccctgcccttcctgtggctcatggccatctgagaaactggagttccatgtgctcctagggaaggcctggttagtgggatggataagctttcttccggacacttgggaactaaaatcttgtacatgggtgcatttttaattttaatttaatttaattttttatatttttattttattttattttatttttgagacagagtctgactctgtccctcaggatgaagtgtagtggcacaatctcagctcatggcaagctttacctcctgggttcaagtcattctcctgcctcagcctcccaagtaactggtgttatgggtgtgggccccaagcccggctaatttttgtatttttagtagagacagggtttcacgatgttggcggaggctggcctctaactcctaacctcaagtgatctgattgccttggccttccacagttccaggtttacaagtgtgtgcagctgggcccggtcagccgtttcttaaaggaagcacacagctgtgtgtttcaggtacgtgctcaccgcgagtggaaaaacaaaggtgactcagccgggggcaggactgggtaaaaatgctgacttggaatcaatgaggccttcagggacctgtgttctagactcagaaatggagcctgaagttctagactgatgcaggagttgccaccgcaaggatggttatttaaaaatgtcaaaaataaatggaacctgaatggaaactttctggtgtcttccacgattgatcaacttgttttagacatttatgtatcagaagtctctagaaatcaccctcctgggttcaagcaactctcctacctcagcctcctgagtagctgggactacaggggaccgccaccacacctggctaatttttgtattttaagtagaaagggggtttcaccatgttggccagtctggtctcgaacccctgacctcaggaaaaccacttgcctcagcctcccaaagtgcttggattgtagacatgagccactgcacctggcctgatattctgatacaagcataaaatgtgtaatattcaaatcatggtaactgggatatccaccatctcaagaatttatcttttctttctgctagcaacattccaattccattattttaattatgtagaaatttactacgaactattgtcaacatgagttgccctattgtgctactaaaccctagatcttattcctgtctgtgtttttgttcccattaaccatccccttcttattctctatttcccagtacccttcctagcttctgataaccatcattttactatttttaagtttcatgttttttaattcccaaatatgagtgcgaacatgccatgtttgtctttctgtatctggcttacttcactcaacataacgccctccagttccttccatgttgtcgcagataactggatttccttcatgtttacggctcagtgatattctgttgtgtatatttaccacattttcttgatccattcatctgctgatggacacttacgttgattccaaattttggctattgtggatagtgctgcaataaataggagagtgcaggctgagtgcagtggctcatgccagtaatcccagaatttcgggaggctgaggcaggtggattacttgaggtcaggagttcaagaccagcctgaccaacatggtagtgtagatatctcctggatatattactttttttttttctggatatatgtccagcagtgggatttatggtttatatggtaatcctatttttattttttggaggaagctccattctgctttccatagtagctgtactaatttacataactaccaatgttgtaccagggttctcatttctccatattcttcatagcatccattattttctgttggttttttatgggggaactccccttactattaaaactcaaatccagtttggtgtaaacacagaaaccctgctagagttgcctgccacctttgaaacaggccattggaatgaaaattgtccacctatgcaccaggtctctattggacagaatgttttgtcccacaggttgttcacattagaggagatttcttttttgtttttctttacttttctgccttttttttttttttttttgaggtagagtttcactattgttgcccaggctggagtgcaatggtgggatctcagctcactgcaacctccacctcctgagttcaagtgattctcctgcctcagcttcccaagtagctgggattacattcatgcaccaccacagctggctaattttgtatttttagtagagacagggtttctccatgttggttaggctggtctcgaactcccaacctcaggttattcccccacctcagcctcccaaagtgctgggattacaggcatgagccaccacatctggctagaggacatttctgatgtctccatattgatggaatttaaaataactctctggtaaattgttttctataatagccttaaataaaaatggagaagctgagattaagatcattgcagacttaggtacagaattggtggaaaccagggctgccatatccagtttacagccaatatatcagcaaatcccttggagaaaggaaaatatttctgaggaggggtttcacatgaagttcagaaaattcctgtgtttgaagcattccaaatgacatttggaccatttttaggaaagtatggctttttattaagtgacaacatggggatgagatttgctttctccgttaaggtgatgcgtaaagctttctttggagggagagaaaaccctagagtttcctgaccttccttaacctgagctgcttggttccctagaagcagaaattgatcatattagaacccaaactcataccaactttgaccttcatgaagtactcaagtgtttctgctcttcttcctcatgtgatgtagaaagtattaaaagtgatgagtttaggccaggcactaactggttcacgcctgtaatctcagcactttcagaggccgaggtgggtgcatcacctgtggtcaggagttccagaccagcctgggcaacatggtgaaactctctctctactaaaaatacaaaaactagctgtgtgtggtggtctgtgcctgtaattccagctaactgggagactgaggcaggagaatcacttgaaccaggaggcagaggttgcagtgagccgagatcgcaccattgtactccagcctggaaaacaagaatgaaactctatctcaaaaaaaaattaataaataaatacattataaataaataaattaattaatgctttaaagaaaaaagaaataaactttgcctacaagtttcatatgcaattgaatacctcttaaattttgatgtgaatcgaccaggcatggtggctgaggcctgtaatcccagcactttgggaggccgaggcgggcagaccacgaagtcaggagattgagaccatcctagttaacatggtgaaaccccgtctttactaaaaatacaaaaaattagccaggtgtagtggcatgcacctgtagtcctggctatttaggaggctaaggcaggaaaattgcttgaaccggggaggcagaggtcgaagtgagctgagatcgtgccactgcattccagcctggtgacacagtgagactccatctcaaaaaataaatgaataaaataaataaatcaataaaaatattgtgacaggaaccaacattgctcaacttgtacactaatgtcttacaaaatcctttccttgtcaccttcaaatctccatttcaaatgctacactctgcataactctaccactttgttgccattttctgatggtggagaagaccatacatgtgtgtgtgtggcatcagaactattgactcctcctattgatgtttaagatattccattacacaaacctgggttcatactttttgttgatagatcttatgccaaaaatgtaggcaaaaaatgccaagcaggaaatgctatcacttctgaagatgaattcatacagatggaaattctttcagaatttatttttccagcttttttctttgtttgttcgtttgtgtttgtttgttttgagacagtctcgctctgtcaccaagttggagtgcagtggtgaaatcttggctgactgcaacctcctcctcctgagttcaagcgactctcctgcctcagtctctcgagtagctagtactatgggtgggcgccaccatgctcagctaatttttgtatttttagcaaagacagggtttcaccatgttggctaggatggtctcaattttttggcatcgtgatctacctgccttggcctcctgaagtgctgggattagaggtgtgagccaccaccatgcccggccttttttttttttttccttttgagatggagtctcactctattgcccaggctgggaatgggattcctcctatcaattctttttttaaattttcttttgttttattgacctgacaaggctcaaatagagttgagtttttgtttttgttttttccattggaagggacaatacagaggttacaatcattggctttagatgacacgataaaagaataaaacatattccttgcaagacaaccagcaaaacttcatgatcagcatcaaatcagtgccttctcactgtcagtgggtggaagccttcatcaatacttgtagagtttgaagcactcatgaactcacaatcagactctttactcagggacaggatgtaagccaatcgaaagaccttccacaggtggtgaatttgggagcctgcccaatgtgacctgcaagttttcactggcaatatgcaggtgcagatatgacaaagaataaccatgacctttacatcacccccagctgttgaggaatgggatccttttgaccctttctgtccatagaaccatgttactcatcttgagtggcaacaaaatatatggtctacttaacagagaagaagactctgtaaaaaaaaatgtttattatgaagtaagcaaagaagtggcaatagatgcgagattatttggggagataaaggaagttgaaggttttgaaaggaaaaataaggaggattatacaaattgttttgaaagactcatacttggtcataaggattaaaaccaaaagggcatcagtgcaatgttagatagattcctcttacacccactcaataacccccaacatgttcagcaagtcttgcttcactcccaggttcccattaaaaacccagctcaaccctgaccagctccaccctcacttccatttgtaattttgacatgactttattacaggaccatcaggttcctatgcctgctgcacagtagcttagcaatattctgagacagcagggtttgcagcagagagtttaatgatcacaaggtggctgaatgagaagctaggaggagatcctcaaattcatctccccaaggagtactgaaggtttccagtggatcctggatagcaaggggccggaaagttggggtagcggtaagagggaagaagtcaacaggatgtagaaactgcattctttggtgagttggtgcattgcatggcccttcagatcagctggcatcagcagtttcactgacatgcagaacctgaaagaatatctcagatgaaaaaattaatgttttacaatgcttgaatcgttgtctgcagggaagttaaggggaactgtaatctaaggtctatatgattttggaacagtaggctgccagcaaccacgaggaaccaggtcagagagcaagaagacctcctgatgaaggctgaatgtgttgcaagcttcgtttatttttgtttctctccctcccttcttcactgattaaatttataaactttagagatgtggtttcaatttcttccaaagaagccttaacctaagccctgagaccactcacgccctcagtggcacctctcctccaccagaacgagcatgtaatctgctaccttaggttacacaaaatcccaaaaaccattcaatacattgagatttttattctgatttcgtagggatgactcctctgtttttataaagctttttaaagtagaaagcatttttatattttgatgtggccaaagatctcctaacaacactactttcagattttatttttctgtctaatgtcgtaacagatcaaatccgtccctgcctcacactcaagactatgaagttcacatattagtaaaatgccatcagtgtttgtggagttcatgaatgaatgatttttttattttttgacagaatctccctctgtcacccagactggagtgcagtggcacaattctggctcactgcaaccattgcctcctgggttcaagcaattctcctgcctcagcctcccatgtagctgggtttcaggtgcctgccatcatgcccagctaatttttgtatttttgtatttttgtagagacagggtttcacctttttgacctggctcgtcttgaacccctgacatcaggtgatctactcaccttgtccttccaaagtgctggaattacagctatgagccacctcacccacccttgaatgaatgtattcttgacttctaccctatccctaacactgtcaatttcttgcttcacgaactgaatatagatatgtgatatgaacggatatctgactcaatccattaatctggggagagccaaaaacccaatcaggattaactgggtggagcttcacaaatgcaatcagatattgctttttgattggaagctagcagtgcaaacgtggaagggcatgggtgggagttgtgattagaaaggtcaataaaatcttctaaagacccacaggagagacccaaagtcttcaagcctggagttcctgcttggttcttcctgaggtctgagcaccttctagactacatccagatctggtaagtcactaatttctgtaaggacactcccatctgacctacagtcagtcagtctgggatggtgacagtgcagcctacgatggcacagagctatatcctgtcctttttttttctcatatgaacaatttgaagctttgaattttttcctctaaatgcagttctgtctttatttcaaaaaagttgattgtgctttggttgatgtcatttcaaaattcttgaagggagcagtgactcatgcctttaaccccaacacattgggaggccaaagtgggaggatcatttcagcccaggggtttgagaccaacctgggcaacatgacaaaagccctcctctacacaacgttttttttttttttgagggtggggatggagtctcactgtgttgcccagactggagtgcagtggcatgatctcaactcactgcaacctttacctcccgggttcaagcaattctcatgcctcagtctccatcctcagaagctggtgtcacagacatctgaaaccatgcctcgctaatttttgtatttttagtagaggtggggtttcaccatgctggccaggttggtctcgaacacctgacctcaagtgatccacctgccttggcctcccaaagtgctgggattacagctgtgagtcactggtgcttggcctctactttttttttttttaattagccgagcatggtgacatgcatctgtagtcccagctatttgggtggctggtgtgggagaatcacttgagcccagaagattgaggctgcagtgagccatgctcataccactcctgtactccagcctgggcaaaagagagacaccctgtccaaaaaacaaaaacaaaatcaatcaaaaaggatctttgaccttaattttaaaccaatcacatcctcttccacccaaatggagacatggctgtggggggtgcatgcctgtagtcccagctacgtggaaggctgaagcatgagaattgcttgaatcttggaggccgaggtaacagtgagccgatatgacaccactgcactctagcctggccgatgaagtgagattcagctccctcaacaccaaaaagaattacgccacctaggtgatctttggatatatgaagatttctactgtgttttcttagggactgtcatctctgtctttgaaaactgttttaactctgaaatattttgataaatttgacatggccaaggatccctcaacaaagatactttcaagttttctttctttctgtctaatatcaggaagaggttcaacccttccctatctcacactcaggactttgaaggacacatattagtaaaactccatgtttgtgaagggaatcagtgaatgagtcctggactttcaccctatccctaaatctttcattttgatggatgaatatctaattcgatcagttaatatttaagaaagtcaaaaatccaatcaggattaactgggtagagattaagaattctaatcaaatgtagctctctctgtctctctgttcaatctagcctatttcccaggctggagtggagtggtataatgtcagctcactgcaacttctgcctcctgggttcaagtgatcctcctacctcagcctccctagtagcttggactacaggcggagaccactgcatctcactgaaattttcaataatgaggctggggcggaggctcacacctataatcccactatgttgggaggccaagaggggtagattgcttgagactaggagttcaagaccagcttggacaacatagcgaaatccactgtctttacaaaaagtcaaaaaataaaagatgagctgggtgtggtgatgcataactgtggtcccagctacttgagaggctgaggaggaagaatcctttgagctgggaggtcaaggctgcactgagctgagatcccaccactacactccaggctgggtgacagcaagaccctgtcagaaagagagtgagagagggagagagagaaagagagagagaatgagagaagggaggcagggaaagaagacaagaaagaaagaagggagagagaggaggaaagaaagaagggagggagagagggaaagaaggaaaaaagaaagagagaaagagaaagcaagcttaaataatgaaaagaaaacaaatagaacctgttctagggatgccccatgaatgttcccaacaagcttatttttaggaactgaaattgtgggcatgtaggcttgtgacactccctttcccattgttttagaaccttaagtaattaataatttcccccaatggtaggaggggttcactttcaggttcctccacactcactagtcactggatggagcactggatagaaaggaagggctagtggtggccctgcttcctcactgcttcggagacgctcatggtgatgcagcagaggcagaatgctggcttaatggccactgagtacagagtagaattggagtaaactgagggctgtttcaccattgccagagcagtgactttggccctgggagaagatgagattgcatgggcttggcctgagagtgatgccttttctctgggtttgtcctctggaagttttccctgcagattcatgaagatgagcatccggattccacccagactcctggagcttgcgggcggagcctgctgagggaccaagccttggccgtctccaccctggaggagctgcccacggaacttttccccccactgttcatggaggccttcagcaggagacgctgtgaggccctgaagctgatggtgcaggcctggcccttccgccgcctccctctgaggcctctgataaagatgccttgtctggaggccttccaagctgtgctcgatgggcttgatgcactgcttacccaaggggttcgtcccaggtgaggtggcccaggtgggctggtggggagggcccaggtgtccaactgaaggaacagctgggtcatgtgaagtgaggaggcccaagggggatggtggtggtgaggaagccgagaggacttggccattcaccagctcctcagggaaagcactgctcaccaggcaaggtccatagaggtaacaggaacctctcctctaatggcactgaaaggcaccatgaaaagtgagaactgggccgggcacggtggctcacaatgtaatcccagcacattgggaggctgaggtcaagagttggaggccagcctgtccaacatggtaaaccccaactctactacaaatactaaaattagctgggcatggtggtgggttcctgtaatcccagctacttgtgaggttgaggcaggagaatcatttgaacccgggaagaagaggttgcagtgaggtgacatcacaccactgcactctagcctgggcgacagaaggagacttggtctcaaaaaaaaaaacaaaaaaatgtggaagtgggtaggatccaaggggaaaacagggtgaagaaaactcagagagagggacaacaagcagggaggggaggagctgctatgcaggatgtggagtttaagttcagaaatgagttcttaaattctcagtctcacctctattttcccacaggagatggaaacttcaagtgctggatttacaggatgtctgtgagaacttctggatggtttggtctgaagctatggcccatgggtgcttcctcaatgccaagaggaacaaaacaccagtgcaggactgtccaaggatgagagaacggcagcccttgactgtgtttgtagaactttggctcaagaacaggactctggatgaatacctcacctgcctccttctatgggtcaagcagaggagagatttactacacctgtgctgtaagaagctgaaaattttgggaatgcccttccgcaatatcagaagcatcctgaaaatggtgaacctagactgtatccaggaggtggaagtgaattgcaagtggatactgcccatcctgacacagtttaccccatacctgggccacttgaggaatcttcagaagctcgttctctcccacatggatgtctctcgctacgtttccccagagcagaagaaggagattgttacccagttcaccactcagttcctcaagctgcgctgcctccaaaagctttatatgaactctgtttctttcctcgaaggccacctggaccagctgctcaggtgagggagggtggtgagctttctctgcagaccacagcagagcctgttacagtaaacactagtgggcatctactgtgagccagcctatgaggatgtaacagtgaaggggacactagaatgtccatgcattgtcctgttggcggccctgtcctgaaatgggtatcatgcaaccctcccaatagagtcagagggatcagtcaggggagatgctatagagaggctgccatgctaggaagctagctactggggggttcagatctagtgagggtgcctttctgaattcttcctgaggatgtgtgtctaagttaagatgatgaaaaataggccaggggcgttggctcatgcctgtaatcctagcagtttgggagtctgaggcaagaggatagcttgagcctaggagtttaagagcagtctgggtaacataccaagacccctgtcagaaatgaataaataaaagtaaaatcaaacaagataaattttttttctgagatggattttcactttgatcatccaggctagagtgcagttgtgacatctcagctcgcagcaacttctgcctcccaggttcaagcgattctcctgcctcagcctcctgagtacctgggattacaggcgtgggccaccacacctggctaatttttatattttaagtagagacaggttttcaccatgttggccaggttattctccaacccctgatttcaggtgatccacccaccttggactcccaaagtgctgggattataggcgagagctaccacgcccagccaacaagataatttttaagaagatgatgtgaagtagggaagtgaagtgggcactgaagaggggaatgctcagcaaacctgcacatgtcagaaaatcagctttgtgccccacagtttggtgaacatgaatgatcccatctctaattcccattgtaaaagtttcttttgagctccaggtaaattaattacctaggaaatgtatgattctgaaacagagggtcagggagcaggcacaaagaatgatgaaagtgatagatggtttgctgatgatacaggtgtgtcagggacgcctgcagcctgcccaccccagctgatgttgcaggatcctgtctgggtttgtcctttatgcctgcatctccactgggcttctgtggcccagggatgtggttttctgcctgacagatgaggaaagggagctttagggattctgtgaacttgatccattcctataaatgatggtgaaatgactcagcctgaaatggaattattttttctccttttttttttttttaatagagtatcactctgtcacccaggctggagtgtagtggcatgatctctgctcactgcaacctacacctcctgggttcaagcgattcttctgcctcagcttcccaagtagctggaattgcaggctcccgccaccacacctggctaatttttggatttttagtagagacgaggttttgccatgttcagcaggctggtctcaaactcctgatctcaaggaatccaccagtctcagcctcccaaagttctgggattacaggtgtgagttactgggccgggcctaaagtggaattgacctcggtggcaaagctcttcatcacacatcatccgaagtgttgaccatccggccatgagaatgatcctggacttgggcaaaatggtctccatccattaccttgaagccattccccaccaccctccactcacccctatgattccccagaattaacttcttgctctctctccccagctgtctgaagacctcgttaaaggtcctcacaataactaactgtgtgcttttggaatcagacttgaagcatctctcccagtgcccgagtatcagtcaactaaagaccctggacctgagtggcatcagactgaccaattacagtcttgtgcctctccaaattctcctagaaaaagttgcagccacccttgagtacctggatttagatgactgtggcatcatagactcccaagtcaacgccatcctgcctgccctgagccgctgctttgagctcaacaccttcagcttctgtggaaatcccatctgcatggccaccctggagaacctgctgagccacacaatcatactcaaaaacttatgcctggagctgtatcctgccccgcaggaaagttatggtgctgatggtactctctgctggagcagatttgctcaaattagggctgagctgatgaagaaagtgaggcacttaaggcaccccaagaggatcttgttctgtactgacaactgccctgaccatggcgacaggtcattttatgacctggaggcagatcaatactgctgttgaatgcctgcctatttggatgggtatgtcaaacgctttcttctggacacttggaaactaaaacctaggtcttaggtacatcctaaagggagcacagaacccatcgtttcacacatgggctctgaaagtgggaaaggaaagctgatcaagcaggggcaggacttgggggaaatgttgccatggattcgatgggactttgggaacctgtatcctgtagagtcgaaaatgggaatctgaatgtctagagtggaattcaggcttgagaatacatgagggagttactcttgcatggatggttgtaaagaaacaatcagaaataaaggaaaactgagcagaatctgtctggtgccctccattattaagtaacctgttttccagtttaagcctcaggaatcttcagttattgatggaaaaaacaaaaggcactgactgagttgtccaatcaataagatgcagcccaagaaaatcaaggcatttaaatgaaatttggttattgtaaccagtttcctcccattcttttatttgagacagagtttcactcttgtcgcccaggctggagtttagagtgcaatggtgccatctcagctgactgcaacctccacctggggtttaaatgattctcctgcctcagcctcccaagtagctgggattacaagcatgcaccaccatgcccagctaatttgtgtatgtttagtagagacagggtttcctcactatgttggccaggctggtctcaaactcctgactttgggtgattcacgcaagtaggcctaccaaagtgctggggttacaggtgtgagccactgtgtcaggcttttgtttttgtttttgttttttaaaggtctcctgtcactcaggctacagtgcagtggcacaatcatacctcattgcagcctcaatttcctgggttcaagcgatcttcccacctcagcctcctgagtagctaggactacagctgtgtgagccaccacacctggatactttttttttagtagaaacaaggcctcgctgtcttccccaggctgatctggaactcctgagcttgtgattctcctgccttggcctcccaaaatgcagggagtataggcgtggaccaccacgcttggcttggcctcctccagttcttcacttctttagatgtctgttaactccttgttagtttctgtggctgttcagtgggttaatacacactaggtggacaccaaaggcctggaacattgctgggcaagaacagtgagccaatccacacggaaagcaccttcttctcagcgtctttcaccgctagccagatgctgagaccctgcccactccctgtgagtctccacatgcttccagaagccttagttggtggatgtcagcttcactgcacaaggagccagtctcttcccgctgccctggaaggggatgtccatattgtatattagctggagactctgggcagcaccaacccttgcttgttcccctgatgaccagcagcccttcttgaattaaacttgttgtagccagtaaagacagccacattccctttaagtaaaatactaaaactatacaggcatgtaacactttttaaatatttccatctgacattttaaaagttacatctttttggggagctaggtcagattgatgagagattttctcataacaccttccctctctccctatgaaggaagtgactagtgcagcatgttctggaatctgacatcatcaaagggtggataacgatcaagtgcctgtgggtgatgagtgaccttccctgtggtgaggaagcctgcatagtgggcacccaagtgaaggatcctgctgtgtactcaggggctggtgttgctgtcagggatgttagcctagagcctcagcttcctgtaaaatgaggatgatgatatccaacagcttatgggaccttggtaggatccaatgagatggttcatgtttagggcttggcatggggtctggcatacagtaagatcaatacatcttgttcttttttctcttctcagcagaagtcccagcatttttcatctttcaatctcacctccttttcctgataatagagaggcaacaagaactcagggcatgcaatggggctcaacttctactctctgccacaatttcatcatgattcccccaaagagcagagccccaggagccagcagggggcagggtgggcatttctggactggattcattcataataagatcaaaatttccaatccgtatgtctcgggtgccatctgctgatagatcggaccagatggtataattgagtgttgcaaggattatattttatggtgtttttaaaaatgtactattatgagccaggtgcagtggctcatgcctgtaattccagcactttgggaggctgaggcaggtggatcacctgaggtcgggagtttgagaccagcctgagcaacatgaagaaaccccttctctacttaaaatacaaaaaaatagccaggcgtggtggcacacgtctgtaattgcagctactcgataggctgaggcgggagaatcgtttgaacctgggaggtggaggttgcggtgagctcagactgagccattgcactccagcctgggcaacagtagcaaaactccgtctcaaaaaaaagataaaataacatttattattatggccgggcatggtgtctcacacctctaatcccagcactttgggaggccgaggcagcctcgggatgttgagaccagccttgctaacatggtgaaaccccgtctctactaaaaatacacaaaatttgctgggagtggtggcattcgcctgtaatcctaggtattcaggaggctgaggcaggacaatcacttgaacccaggaggagaagattgcaatgagacgagatcgcgccactgctctctagcctgggcgacagagcatgaaaaaaaaatttactatagtgtgaatactattagagtataactatttgtgttgtaatttatgtgtatgaaagattagaactttgaaagaatgcaacgtgatattttaagaatggttaatggccaggtgtggtggttcatgcctgtattcctggcactttgggaggccgaggtgggtagatcacgaggtcaggagttccagaccagcctgtccaacatgatgaaacccggtctctacgaaaaatacaaaaaattagcctggcgtggtgacaggtgcctgtaatcccagatagtcaggaggctgaggcaagagaatcgcttgaacctgggaggcaaaggttgcagtgagccgagaatgcaccactgcactccagcctgggtgaaagaggaagactccgtcccaaggagggtgagaaaaagaatacttaacttggtttgaaatgtcaaaacaaatgagattttgaaaactaattttaaagacactgaacaataatcatttcttctttaaaatatatttagaacaatacaattttatctttgaaaggaaacattacagtttttaaaaatcttgagtttatttcattttattttattttgagacaaggtctcactctgtcgtccagattggagtgcagtggcatgatcacggctcactgcagccttgacctcctaggctcaggtgatctccctgcctcagtccccctggtagctggaacgacaggcatgcaccatcatgcctggcttatttttgccaggtttcaccatgttgcccagactggtcttgaaattctgggctcaagcgatccacctgcctcggcctcctaaattgctgggagtgagcccttataggcatgagccaccgcacccagccttgagtttatttatttatttattttggagatggagtctcattctgtcatccaggctggagtgcagtggtacgatctcagttcactgcaacctctgcctccagggttcgagcaattctcctgtgtcagcctccagagtagctgggattacaggcatgcaccaccacacctggataatttttgtattataattattattattttttaatagagacagggtttgtcattttagtcaggctgatctcgaacccctgacctcaggtgatccacccacctcagcttcccaaaatgctacgactatagacgtgagccaccacgcccagcctatttttttctttatagcagctttagattcacagaaaaactaagcagaaactgcagagttctcatctaccttcttcccccttcaatacacagcacccccacaggatcagcacccacaccagcacagagcattcgtcacaatcaatgagccacagggacacatcattatcacccaatgtccatagttcacatgggggatcattgctggttttgtacattctatggattttaacaaagggataatgacacatatccaccattagagcatcatggagactagttttgttcccctaaaagtcctctgtcctcttcccattcatcccattgtactcccaacccctcacaaccactgggctttctactatctccatagaaaaaggcaaatgtctaacaggatgagtcttttcacattgccttctttcacttgtacaataacgtgcatttaggaatctttcatgtctttttaaggcttcataatagttcactgactggatggatcagtttgcttatccagtcactgactgaaggccaacttgctagcttccaggttttagtgattatgaataagctgctataaacatccaggtgtgggtttactcatttcattaaatatccaggagcatgattacggaattgtaggggtatggtatgttttacaatgatttcttctttcttgacaatctcacttgttcgatattgctgctaaaggtcaggaactttgtctcaatcatcctatgttcctactgctgagcatggaacgtggcacttggtagcaaatgctgttgaccacgtgatgcatggaaacgtttatcatgggtatagtcactaaattgctaccttggggacatcaacattagctcactaccaataatataaataaattggattatggaaaaaatggcccttgtgatactgtggatactgtatgtgtatcatgaaagtccagcaattgacaaggcacagtggctcacatctgtaatcccagcactttcagagactaaggtgggtggatcacttcagtcaggagttcgagacgactctggccaatatgatgaaaccctttctctattaaagacacaaaaattaactagggggttgagccaagatggccgaataggaacagctccagtctacagctcccagcatgaacagtgcagaagacgggtgatttctgcatttccaactgaggtaccaggttcaactcaatggagagtgtcagaaagtgggtgcaggacagtgggtgtagtgcatcgagcatgagccaaagcagggcaaggcattgcctctcctgggaagggcaaggggtcagggaattccctttcttagtcaaagaaaggggtgacagacggcacctggaaattcaggtcactcccaccctaatactgcacttttccaatggtcttagcaaatggcacaccaggagattttatcccatgcctggctcagagggtcctatgcccatggagcctcactcattgctagcagagcagtctgagatcaaactgcaaggcggcagcaaggctgggggaggggcgcctgccattgccgaggcttgagtacgtagacaaagcagccaggtggctggaactgggtggagcccactgcagctcaaggaggcctgcctgcctctgtagactccacttctgggggccgggcattgccaaacaaaaggcagcagaatcctctgcagacttaaatgtccctgtctgtctgacagctttgaagagagtagtggttctcccagcatgcagctggagatctgagaacggacagattgcctcctcaagtgggtccctgacccctgagtagcctaactgggaggcacaccccagtagaggcagactgacacctcacatggccaggtactcctctgagacaaaatttccagaggaacgatcaggcagcaatatttgctgttcaccaatattcgctgttctgcagcctcttctgctgatacccaggcaaacaggttctggagtggacctccagcaaactccaacagacttgcagctgagggtcctgactgttagaaggaaaactaacaaacagaaaggacatccacaccaaaaccccatctgtacatcagcatcatcaaagaccaaaggtagataaaaccacaaagatggggaaaaaacagagcagaaaaatgggaaactctaaaaatcagagtgcctctcctcctccaaaggaatgcagctcctcaccagcaatggaacaaagctggatggagaaggactttgatgagttgagagaagaaggcttcagatgatcaaactactctgagctaaaggaggaagttcgaacccatggcaaagaagtcaaaaacattgaaaaaaaaattagaagaatggctaactaaaataaccaatgcagagaattccttgaaggacctgatggagttgaaaaccatggcatgagaactacgtgacaaatgtacaagcctcagtagctgattcaatcaactagaagaaagggtattagtgatggaagatcaaatgaatgaaatgaagtgagaagagaagttcagagaaaaaagaataaaaggaaatgaacaaagcctccaagaaatatgggactatgtgaaaagaccaaatctatatctgactggtgtacctgaaagtgatggggagaatggaaccaagctggaaaacactcttcaggatattatccagcagaactttcccaatctagcaaggcaggccaacattcaaattcaggaaatacagagaatgccacaaagatactccttgagaagagcaactccaagaaacataattgtcagattcaccaaagttgaaatgaaggaaaaaatgttaagggcagccagggagaaaggtcgggttacccacaaagggaaccccatcagactaacagcggatctcttggcagaaactttacaagccagaagagagtgggggccaatattcaacattcttaaagaaaagaattttcaacccagaatttcatatccaaccaaactaagcttcataagtgaaggagaaataaatttccttacagacaagcaaatgctgagagattttgtcaccaccaggcctgccccacaagagctcctgaaggaagtgctaaacacggaaaggaacaactggtacaagccacttcaaaaacatgccaaattgtaaagaccatcaaggctaggaagaaactgcatcaactaacgagcaaaataaccagctaacatcataatgacaggatcaaattcacacataacaatattaccctaaaatgtaaatgggctaaatgctccaattaaaagacacagactggcaaattggataaagagtcaagacccatcagtgtgctgtattcaggaaacccatctcacgtgcagagacacacataggctcaaaataaagggatggaggaagatctaccaagcaaatggaaaacacaaaaaggcaggagttgcaatcctagtctctgataaaacagactttaaaccaacaaaggtcaaaagagacaaagaaggccattacatcatggtaaagggatcaattcaacaagaagagctaactatcctaaatatagatgcacccaatacaggagcacccagattcataaagcaagtccttagagacctacaaagagacttagactcccacacaataataatgggagacttcaacaccccactgtcaactttagacacatcaatgagacagaaagttaacaaggatatacaagaattgaactcagctctgcgccaagcggacctaatagacatctacagaactcacaatccaaaatcaacagaatatacattcttctcagcaccacactgcacttattccaaaaattgaccacatagttggaagcaaagcactcctcagcaaatgtaagagaacagaaattataacaaactgtctctcagaccacagtgcaatcaaactagaactcaggattaagaaactcactcagtgtgtgatgttccctttcctgtgtccatgtgttctcattgttcaactcccacctatgagcgagaacatgcagtgtttggttttttgtgcttgtgatactttgctgagaatgatggtttccagcttcatccatgtccctacaaaggacatgaactcatcattttttatggctgcataggataccattaggaggtatacctaaggctaaatgacgagttaatgtgtgcagcacaccaacatggcacacgtatacatatgtaacaaacctgcacgttgttcacatgtaccctaaaacttaaagcataataataataataaaagaaactcactcaaaaccgctcaactacatggaaattgaacaacctgctcctgaatgactactgggtacataacgaaatgaagacagaaataaagacattctttgaaaccaatgagaaaaaagacacaacataccagaatctctgggacacattcaaagcagtgtgtagagggaaatttatagcactaaatgcccacaagagaaagcagaaaagatctaaaattgacaacctaacatcacaattgaaagaactagagaagcaagagcaaacatattcaaaagctagcagaaagcaagaaatagctaagatcagagcagacctgaaggaaatagagacacaaaaaacccttcaaaaaatcaatgaatccaggagttggttttttgaaaagatcaacaaaattgatagactgctagcaagactaataaagaagaaaagagagaagaaacaaatagatgcaataaaaaatgataaagggcatatcatcacggatcccacagaaagacaaactaccatcagagaatactataaacacctctatgcaaataaactagaaaatctagaagaaatggattaattcctcgacacatacaccctcccatgactaaaccaggaagaagttgaatccctgaatagatccataataggctctgaaattgaggcaataattaatagcttaccaaccaaaaaaagtccaggaccagatggattcacagtcgaattctatcagaggtacaaggaggagctggtaccattccttctgaaactattccaatcaatagaaaaagagggaatcctccctaactcattttatgaggccagcatcatcctgataccaaagcctggcagagacacaacaaaaaaagagaattttagaccaatatccctgatgaacatcgatgcaaatatcctcagtaaaatactggcaaagtgaatccagcagcacatcaacaagcttatccaccatgatcaagtgggcttcatccctgggatgcaaggctggttcagcatatgaaaatcaataaacagaatccagcatgtaaacagaaccaacgacaaaaaccatatgattatctcaatagatgcagaaaaggcattcgacaaaattcaaaaaccttcatgctaaaaactctcagtaaattaggtattgatgggacatatctcaagataataagagccatctatgacaaacccacagccaatatcatactgaatggacaaaaatgggaagcattccctttgaaaactggcaccagacagggatgccctctctcaccactcctattcaacaaagtgttgaaagttctggccagggtaatcaggcaggagaaggaaataaaggatattcaattaggaaaagaagaagtcaaattgtccctctttgcagatgacatgattgtatatctagaaaatcccatcgtctcagcccaaaatctcctgataggcaacttcagcaaagtctcaggatacaaaatcaatgtgcaaagtcacaagcattcttatacaccaataacagacaaacagagagcaaaatcatgagtgaactcccattcacaatagcttcaaagagaataaaatacctaggaatccaacttacaagggatgtgaaggacctcttcaaggagaactacaaaccactgctcaatgaaataaaagaggatacaaacaaatggaagaacattccatgctcatgggtaggaagaatcaatattgtgaaaatggccatactgcccaaggaaatttaaagattcaatgccatccccatcaagctaccaatgactttcctcacagaattggaaaaaactactttaaagttcatatggaaccaaaaaagagcccatatagccaagtcaatcctaagccaaaagaataaagctggaggcatcacgctacctgacttcaaactatactacaaggctacagtaaccaaaacagcatggtactggtaccaaaacagagatatagaccaatggaacagaacagagccctcagaaataatgccacatatctacaaccatctgatctttgacaaacctgacaaaaataagaaatggggaaacgattccctatttaataaatggtgctgggaaaactggctagccatatgtagaaagctgaaactggatcccttccttacaccttatacaaaaattaattcaagatggattcaagacttaaacattagacctaaaaacataaaaaccctagaagaaatcctaggcaataccattcaggacataggcatgggcaaggactttaagtctaaaacaccaaaagccatggcaataaaagccaaaattgacaaatgggatctaattaaactaaagagcttctgcacagaaaaagaaactaccatcagagtgaacaggcaacctacagaatgggagaaaatttttgcaatctactcatctgaaaaagggctaatatcaagaatctataatgaactccaacaaatttacaaaaaaaaaacaaacaaccccatccaaaagcgggtgaaggatatgaacagacacttctcaaaagaagacatttatgcagccaaaagagacatgaaaaaatgctcatcatcacatgaaaaaatgctcatcatcaccggccatcagagaaattcaaatcaaaaccacaatgagataccatctcataccaattagaatggtgatcattaaaaagtcaggaaacaaggggtgctggagaggatgtggagaaataggaacagttttacacagttggtgggactgtaaactagttcaaccattgtggaagtaagtgtggcaattcgtcagggatctagaactagaaataccatttgacccagccatcccattactgggtatatacccaaaggattataaatcatgctgctataaagacacatgcacaagtatgtttattgcggcactattcacaatagcaaagacttagaaccaacccaaatgtccaacaatgatagactggattaagaaaatgtggcacatatacaacatggaatactatgcaaccataaaaaagatgagttcatgtcctttgtagggacatggatgaagctgaaaaccatcattctcagcaaactatcgcaaggacataaaaccgaacactgcatgttctcactcataggtgggaattgaacaatgagaacacagggacacaggaaggggaacatcacacagaggggcctgttgtggggtggggggaggggggagggatatcatttggagatatacctaatgttaaatggcgagttactgggtgcagcacaccaacatggcacatgtattcatatgtaagtaacctgcacattgtacacatgtaccctaaaacttaaagtataataaaaaaaattaaccaggcatggtggcatgtacctgtagtcccagctactggagaggctgagggaggagaattgcttgaacccaggatgtggaggttgcagtgattgaagatcatgccactgcactccagcctgggcaacagagctagatgccatatcagaaaaaaaaaaaaagagaaaagaaaacaaaacaaaagaaagtccagcatggtaagaggtacatagaggtacatgggggtgagcttcatttgattttcatcctttttcccttctctggacagaattctcaatgcaaaacattccaaaaacacagagcaaatgtcttctataatcttccccttatctgtgacttcccttcacagtgtatgtgctagcgtcttccagacttttttgtatgacgtgctatacagaagatcagatcaaatgggcacattcccaatcctaataagtggtgacttgccagatctggactcacgttgcagggtgctgggacctctgccagaatcaagcagtagctccaggagccagggctttgggtctcttctgtgcatcttcaggagcttttattgacctttctcaccacgacccccttctcaattaccaacttccaatccaaaaatgacatccaactagatcctgaacttccatccagttaaccctgattgagttttcaactttcttcttattaagtgattaaattagatatagattcataaaagtgaaagaattaataatagggtgaaggtctaaaactcatttattcacttattccataaacactggtaaagtttgactaatatgtgactttcatagtgatacagggaaggatttaagctgtttctgacattagaaaaaaaaatatatatatatgtggtatctttattagagaacctttggccacatcaaaagcatcaaaatgttttagagttaaaacaactttaagaagacagtgatgtcatccctgaaaaacacaataaaaatcttggtgtatccacttgtcacctgggttttgtgctacctaacatggtagatcatatgcccattcaggtggaaaacaggaactactgagggtgtaatttatctcaaggttaaggtcaaggattcactgaaagaaatcaggcctaaattacaaagtgatgtgggggctgggctggacaggactgagtgttttcatgggaccctgggagggaagctagacaacataaaacatggcaggtattttgtgggcatttagacaaaaggattgaaagacttccttctagattgagtttaaaaatttaaaaaaaaacataattacaaaagagataatgcagatccttaaagcatcacagtgtctttgagggcagagagagcagacacagtcttggctcctacttgaaggtgaggcatcattactcacaaacgtgttgggcttccctcagaataccagcttgggaagagtgaatctgagtgtgtgagctggggcagagcccagagaggagcagtgtggtcagacataaagagggagacttttcgatctggaagcatgaatggtggaagctgtgtatctgcagaatttgtgagagaaatgaaccccttggggaaatcctgcaccatcctcaggaccccagcgagaatcctgcagtttggggggtctttctaccatgttctggttgcctgtgcttctgaaggtgctcctctgctgtccaggtcagtgcagccttttgagtccatctgaagggatggcttaacctcagttccactcactgaatttctactgggattccaaagcttctccaggcttttcatcgggggttctaaagtatttctgaacttgcattttcctcccccagcctgagctgtcagagaagctgagtcctctgcttcctggaaatgtcagccaatctctcctgcacccaggagtatggccacaaacaatgctaagaaacactctccctggaatcagcagtgactcatacattctccccaaattctactgagctatttcagtgcccacagcaaggcataaagcagggagctcctcagctgctgctctggacctaaagaggcaaccgggaccaatggaggggaaccttgtctaccttgcacaggaagagccgactcctctggttctcctagaagtgccaggctgttggcagagcctgggatggtcccagtgtgggggccatcccttcccaggctctgctggcccagccttagagctgaggaggctgcacctggaatgcagtgagtctgtttctgagtcagcgcttttcctgtggtgtttgccctctgtgcatttctaacagtcaaaaatctctggtcaggccctgctggcctcctctagtcctcaagggggttttattccagattgcatttataactatcttccccaagaccaggggcttcccctcttttttcctccaataaagatatgaggagaaggtcactctgagagcagacagtggatgttgagggaggtgcctgtagcagcctggggtccgggagatctgcgaactcactgccgccggatggagccagggggactccagaaagggagtggcccagaggagctgatgggggccagagtaaatgaggaggagagagatggcagcagccctggggaccgggttctctggctttcacagagccacatccctgataaactggggacttggatctgagactctgaaaggactggggcctggatgtggggctgtgagtttccaaggccctttgatttcaccctggtctgcatgaggttccattggctgccccacccaatcccagcggcagaaagtcagtctagcagggaaacctggggagagagggtcagtggcaagcatccaccctagatgcaaagacaagggacaggtcagagggaggaagccttggcatgagtccaggggaagggaggcactttggataggcgcagttctgtttctgcacttgccacagcctcagaggactgtgaggattgaactttgcaggagggaatgagggagaatggggtctggactggagtccctgtcatccaagtgaccccctatctactcctgcaaaccagatgaaggtcttgctagatgtaagtcaaaccagggcctatcaggctaaccagcactttctggtggatcctgaaggagcacagtgatcctcggtcaaaaaaatctcacattgtccagggctgaggattgtcaggtggtgctgaagggggagactctggggaaaaaacagagaagattttggtacatttcacactctcaacgcccagtgcttcccccttcctattagtcaggcgtggttccaggataatcacttgaacccgggaagccgaggttgcggcgagttgagctagagccattgcaccccaggctgggtgggcaacaggagcgaaactctacctcaagaaacaacaacaacaagaacaacaacaagaaaacttccactgagtgcctgggtcgtgccacctggtattctgggtgctgctgagaaagatgctgagaaagatcctggtattctgggtgctgctgaaacaagacacaaggcagctggaaaatgagctcagcagaatatacctggctcagaactgcagtgcagatcagaaaaagaatgcctgtgcaggataaaacacgaacagccatcttttcttttctttttcttttttttttttttttttgtttcttctttttaaagacagggcctcactctgtttctaagactggtgtgcagtggtgcaatctcagctcactgcaggctcagcctctcaggctgaagcaatcctcccatgtcagcctcccaatttgctggaaacgcaggtgtgtgccaccatgcctggctcattttgtttatcttttgtagagacgaggtctcactgttgcccaggctggtcttgaatgcctgtactcaagtcatcctcccaatttgagctcccaaagtgctgagattacaggggggagccccatgtcctgcaaagccatcttcataatccatgtggaaaatgatggttatcccaaatcctttcatcactctttgtcagaacattcactactctcactgccaattagaaatgtacaggagaatgaaagaaaaaagttaatattgtccaggtgcggtggctcagcccataatcccagcacttgggaggccaaggagggcagatcacctggtgtcagcaattcataccagcctagccaacatagtgaaaccccatctccacaaaagtagaaaaattaggttggcatgatggcaggtggctgtaatcccagctactcaggaggctgaggcagaagaatctcttgaaccagggagccagaggtagcagtgagccgagattttgcctttgcactccagcctgggtgacacagtcagactccatcttaaaacaaaacaaaaagaagttaatatttattaagtgcaccgtaattcaaaatactaagaattcaagtgctttatttccttggaaaaactcaccaagaggcgttaaaacggtgatggccttccccacagcacagcacagaggaagcagctgacatcttccaggccttggggcactgtcttgcttctttctaagtggggatccgctcccaacacactctcctttgtgcccctcaggccatgaatatctctgaggtctgtgagtgtgaggtctcttgctggtggtgttccttcctgtttcttgggactttcttttttggtgggtctcttggcataagggatgcgagcctggtgagaacaggctggactctgcatcaggacacagaggccctggaggggcagacagtggagcaagcaggggctgaatttacctgctttttactcaaaggaagcccctcaccactgtcttccctgccacagcggctccaataaaaagaaaaaaggtgttaactcagcacattccctggaacagcaagaagaaaacatccctcttggtattcgtataagtattaggactagtgttagctggtttctctctccttttgacataataactcaagataccctggggatctcgagtgcatggaccagcgagtctgaaggagtttgttctttggatatgaacccatgagaagtggatgtgtattctgtggccaaagtcactgacctcttttattagaggagacagaagtgcccaggaaccacccccaggcctgtgcttccagggaccgctctctctctttccatgtgcatgcctgagacggttctgggtcttcactcatcaccatttgctcttctagagttgatgcatctactgtatacttgcaggggacccggtgaagaaagaaatccaagaacccacgtgggtccacatagagtgaggttgcctccagacaggcacaggaaccccgagcctcttagccactgccagagcctgagactggggcactcacatgcagacaaatgcatgggactttagaagaagcagggttggaggtaagagaggagggcatggatggaacgcaggggtcactggaagcttcagggccagaagcacttgggagtggggaaggcatcatcaacagaaaggtcagagctccttccatgccctgaggtcacagcgggtgtccttctctcccagctcctccctgggctcttgtgtctggagtcagggctggctcagctggggttctttggtgagtgggaaggacatagggcactcagggtctcaagtgcaacttttaaaatgatactcaaatgagaggtttcacacagtggcctcctgtccacagatcccatgtcttcttgctggactcctgggggatttgcccagccagggacatgaggtattttacatttatctgccaagtgcaaaacatcttaatctatatgaggccagctccatcctggagggttgtgactttctaagtgctcacaccacatacacatatatgtacataccatgaagtcattgcagagatgccctctgggcctggggttctctcacagaacccagttgataaaagcctcccttctactcacctgagacctagagacatcagccaccccctgccccattcgcccagcatttttcctaaagtggaaaccaactcagaacgcacataaatgaacacagcctctaactcatggacttagggggaacagacagaatgagaagaccagggttgaaagtggcatgtcgtgaagtggcacaggcagatgaggctggagaggtgcagtcagaggcaggggtggcacaggagtcattggcagttttggactggggtggtgaggccacctgaggcctgttttccagttccccattatggcccggaggactttgatccctgagagaggtaaccaggaggcaggggcaacaataaggtggccactgcaatgcccaggcaggaggtcttggcatcacctggtgtggctgcagacagcctggggacatcctggaggtagagtcaatgtgacttgctcttatggtttcaggagtgggtgtgaggcctgaggaaaagcgatgggttgacagcacctcctagagtttggtcttgactcagcgaagttgggaagagtaagtgaaaagccagcatgaagacaacgactcaaggtctttgtaggacattttaaattcaaggcatttatgttattaagagaaaaaaacccaagaacaatataacactcatgaaataaccctgttcaataaaattgtaaaggtgtatacaatttattcattcttaggactcacacgatagatgttcccagatgcttcccatggactatatatcctactggtgtaggtgggagtaaggtgagagccaggattccaatcccagcagttttcaaatcccagaccttcaactaaggtcaacatcagatctggaagaggaaagaggtgcagtttcttttctaattccatcaggatcattctgggtctggccacagggcacactgcactgttctcctatctcagaggagagggtaggatcccaaaagccaaatgtgtccagatatgtgttggcataatgttttaaaaaatagagtttcagttagaaaggaggagtgagttgaatatctatagcatagtaaggtgactatagttagtaataatatattatataattgaaaatactgagacagtaaattttaaatgtctccccataaaaagagtaagaatgtgaagtggtaggaatgccaaatagcttgatttcactattccacattgtagagtatgaatatatcaaaacatcatactgtaccccatgaacagatacaatttttattaataaaatttttataaaatagacgaaaaaaaccttatgggcatcacataggaataccagtgattggtctcaggaagacggaaaactgcaaagataaaataagaactcagcaaaggaacacaaggtaaaacaaaactcaatataagagccagaaaatggcaaaagtcccggtcagagtgacttgtccaagattcttccaaagaaacccaaagaaggaagaaaggggtggtaatttcaagtctctgaaatcctctgctttcctggaatatctaatgactattctaccttctaattaaagaaacacccctgtcaatattagacagatcaatgagacagaaaattaacaacgatattcaggacttgaacgcagctctggaccaaacagacctaacagacatctacaaaactctccaccccaaatcaacagaatatacatttttctcagcaccatatcacacttattctaaaattgaccacataattggaagtaaaacactcctcagcaaatgtgaaagaatggaaatcataacaaacagtatctcagaccaaagtgcaatcaaattagtactcaggattaagaaacttactcaaaactgcacaactacatgaaaactgaacaagctgattctgaatgacaactgggcaaataacaaatttaaggcagaaataaataagttctttgaaaacaatgagaacaaagacacaatgtaccagaatctctgggacacagctaaagctgtgtttagagggaaatttatagcactaaatgcccataggagaaaggaggaaagacctaaaattgacattgcaattaaaagaactagagaagcaagagcaaacaaattcagaagctatcagaagacaagaaataactaagatcagagcacaactgaaagagatagagacatgaaaaacccttcaaaaaatcaatgaatccaggagctggtttttaggaaaagatcaacaaaatagaccactagccagataaattaagaagaaaagagagaagaatcaaacagacacaataaaaaatggtaaaggggatatcaccactgatcccagagaaatacaaactaccatctgagaatctataaacacctctatgcaaataagttagaaaatctagaagaaatgtgtaaattcctggacacatagatgctcccaagactaaaccaggaagaagccaaatgcctaaagagaccaataacaaattctgaaattgaggcaataattaatagcctaccaacaaaacaaagtccaggaccagaagaattcacagtcaaattctaccattcctctgaaactattccaaacaatagaaaaagagggtctcctccctaactcatttttatgaggccagcatcatcctgataccaaaacctggcagagacacaacaaaaaaaaggaaatttcaggccaatattcctgatgaacatcgatgcaaaaatcctcaataaaatactggcaaaccgaatccagcagcacatcaaaaagcttatccaccaagatcaagttggcttcatccctggcatgcaaggctggttccacttatgcaaatcaataaacgtaatccatcacataaacagaaccaatgacaaaaaccacatgattatttcaatatgtgcagaaaaggcctttgataaaattcaacaccctttcaggctaaaaactctagataaactaggtgttgatggaatgtatgtaaaaataataagagccatttatgacaaagccacagccaatatcatactgaatgggcaaaagctacaagcattcccttggaaaaccggcacactgcatggatgccctctctcaccactcctattcaacatagtattggaagttctggccagggcaatcaggcaagagaaagaaatagagtattcaaataggaagagaggaagtcaaattgtctctgtttgcagatgacatgattgtatatttagaaaaccccatcgtctcagcccaaaatctcctaaagctgataagcaacttcaacaaagtctcaggatacaaaatcaatgtgcaaaaatcacgagcattcctatacatcaacaatagacaaacagagaaccaatcatgagtgaactcccattcacaattgctaaaataaaataaaatacataggaatacaacttacaagggatgtgaagaagaactacaaaccactgctcaatgaaataaaagaggatacaaacaaatggaaaaacattccatgctcatgggtaggaagaatcaatattgtgaaaatggccataatgcccaaagtaatttatagattcaatgctatccccatcaaggtatcattgagtttcttcacagaattagaaaaactacttaaaacttcatatggaagcaaaaaagaacctgtatacacaacacaatcctaagcaaaaagaacaaagctggaggcatcatgctacctgacttcaaactatacgacaaggctacagtaaccaaaacaacatggtacagttatcaaaacagatatgtagaccaatggaacagaacagaggcctcagaaataatgccacacatctacaaccatctgatccttgacaaacctgacaaaaacaaccaatggggaaaggattccctatttaataaatggtgttgggaaaactggctagccatatgcagaaaactgaaactgaaccccttcctttcaccttatacaaaaattaactcaagatggattaaagatttaaatgtaagacctaaaaccataaaaaccatagaagaaaacgtaggcaataccattcaggacataggcatgagcaaagacttcatggctaaaacaccaaaagcaatggcaacaaaagccaaaattgacaaatgggatctaattaaaataaagagcttttgcacagcaaaagaaactgtcatcagagtcaacaggcaacctatagaatgggagaaaaattttgcaatatatccatcagagaaatgactaatatccagaacctacaaggaacttaaacaaatttacaagaaaaaaacaaacaaccccgccaaaaagtgggtgaaggatactaacaggcaattctcaaaaataaaacgtttatccggccaacagacatatgaaaaaatgctcatcataactggtcatttgatttgcacttctctaatgcaaatcaaaacaacagtgagataccatctcaggccagttagaatggtgatcattaaaaagtcaggaaacaacagatgctggaaaggatgtggagaaataggaatgctttgacactgttggtgggagtgtaaattagttcaaccattgtggaagacagtgtggcaattcctcaaggatctagaaccagaaataccatttgatccagcaatccctttactgggtatatatccaaaggattataaatccttctactataaagacacatgcacaagtatgtttactgcagcactattcacaacagcaaagacttggaaccaacccaaatgcccatcaatgatagactggataaagcaaatgtggcacatatacatcatggaatactatgcaaccataaaaaataagttcatttcctttgcagggacatggatgaagctagaaaccatcattctcagcaaactaacacgggaacagtaaaccaaaacacctcatgttctcactcataagtgggagttgaacaatgagaactcatggacacagataggggaacatcacacatcagggcctctcagggtgtggagcactaggagaggggtagcattaggagaaatacctaatgtagatgacgggttgatgggtgcagcaaaccaccatggcatgtgtatacgtatgtaacaaaactgcacattctgcacatgtatcccagaacttaaagtggaaagaagaaagacagaaagaaagaaagaaagagagagagagagagagagagagagaaagaaagaaaggaaggaaggaaggaaggaaggaaggaaggaaggaaggaaggaaggaagggaaagaaagaaagaaagaaagaaagaaagaaagaaagaaagaaagaaagaaagaaagaaagaaagaaagaaagaaagaaagaaagaaagaaaagaaagacagacagacagacaggacaggggaggggaggggaggggaagcaaagggaagggaagggaagggaaaagaaaagaaatacccataaaataggaaagctggctggtcacaggagaagcatgaaaatatcaagcagtgatttcatacagcagcaagagaagagcttgtaaaattagctacaagaataaggataagccttgaccaataagacccaaacaagcaggacggggctaagctggctgacactgaattggtcagacatggcactgggtttgacccttgccctaccccaggcctaattatacacccattatgacagtaaatcacacaccagcgccaggacggttctgagaatgcccatatttagtacaaaaacaggtgaaacctagccaggcccagtggctcatacctgtaatcccaacactttgggagcccaaggtgggtggatcacctgaggtcgggagtttgagaccatcctgaccaacatggagaaatctcgtctctactaaaaatacaaaattagccgagtgtggtggcagatgtctgtaatcccagctactccagaggctgaggcaggagaattggttgaacccaggaggcagaggttgcagtaagccaagatcattgcactccagcctgggcaacaagagcgaaactccatctcaaaacataaataaataaataaataaatacataaataaataataggtgacacttcagttctaagaaaacttcaccattttttcttaaaatcctaacgattatttcaacctctccttagagatcctataaaattagaaacccaaactcccttgtacacaactcactctcctgaattggccctctcttgagtatctacctttgctttgcaatagacacttcttgccttttgcttcattctgcctacttcctaaactctttcttgcagcgatgacaagaatgtggacactggttggtgattgagtctctgggtacctggagatgacctaatcactatggcaatagtcagagtctaaaaatcacaccggatattacaattcactctggtttttcttgggggaaaaatccagtaactttggccccatttctccaaaggacatcactcagcacaaactgataaacagcagtcctaccactgggttgtaagtatatggctttattctgggttctctattctgttccattggtctatgtcttgaccttcatactggcaccatgcagttttgcttactattgccttaccatataaattgaagtcaggtaatgtgatgcctccacatttgttcattttgcttaggattgctttggctctttagcctcttttttggctccaaatgaattttaggattctttttgtaatcctgtggaaatgatgtttgtattttggtgtatgcaatttttagattgatgtttgatgttcgcaatttttagattgctttgggcagtgtggtcattttcacgatattgtgtctgtcaatccatcagcatgggacgtttttctccttttttgtcatctatgatttttttcagcagtgtcttgtagttctccttgtagagatcctgtacctaatggttaagtgtattcctaggttgtttttgttattgtcagtttttgttgttgttttgcaactattgtaaagggatggagttcttcatttgattctcagcttgcttgttgttggtataaaagggtgttactgatttgtacatacagattttggacctgagacttaagtgaattcatttatctcatctacgagtcttttggtggaatctttcaggttttctaagcacatacgatcatatcattggcaaacacaggtagtttcacttccttctttccaatttaaatgtcctttatttcttttgcttaccagattgctctgacaaaaactttcagtcctatgttgattacaagtggataaagtgagcatttttgtcttcttctggttcttagtgggaatactttcaacatttcttcattcaatatgatgttgcatatggatttgtcatttttggcttctattattttgatgtatgttctttctaggcatagtttgtgtaagtgtagtccattattttacaagcttagatttgtattctgttttacctgagtgcgttctgagatttggcatctattttacctgacataagtacagatgctcgtgctgttttttggtttccagttgcatggaatactttattctaccccttcactttccatctacatgtatccttataggtgaagtgagtttctggaaaacagcatatagtagggtcttatttttttactcattcaaagaccctatgcctttcacttgcagaagtgagataaattatattcattgtttttattgataaaggcttagtactcccatttcatttcttgtttttttggttgtttagagacttctctcttccatccttttcttattgtctttctttgtgtttaagtaattttctcttctggaatccttggaatgtgacttttctggccagaaacctctgtggctgggggcacctttgccagagttttgatggggatcactgggttcgttctgcccatgcagcctagtagactatgcttgactcatgttttaggcctggagcacatgcctattaagggcaggtcaggggtagagcagtgaggggtgtgtgagtgagcagggggtctggccactttggacagtcactggctgctgctgcagcagtggggcaggcagctccaggtgccagcacgggtgccagatttcgtcaaggctgcaaatgaaccaggcacagcacaagcagcttccatggttgtcactggaatacacagtgacaccaatactgaaagcttggaaatgccagtaactgcagaacccccagaaaggagtaacagccctggctcaggaagctcccatgtctgggctcctggaagattagtagctcttctctttttctcttcacctacaacttggtgagcaagggctgtgtttcagctttgtttgtgttattgctcttttagtcccaccattaggcgggtcccaagttcttgttctgtgaccaggaagaatgaattatgcagacaagtggagggtgagtgagataaagaggagctttactgagcaatagaacagctcagagacccacagtgggtaacttctttctgcagctagggtgtcctgatgagtgttcagctctgagcagacaggaggcgctggagtgggtgacccctctctcctggcaggttattccatcatcaccactgctctcagtagagaggaggccctggagtgggttgctgctctctgcaggaaagtcatctcatcatctctacagctctcagcagagaaaaagacccagagtgggttgcttgtctctgcaggaaaatcatcccagtagtgggtagttcctctctgccactggtcttcctgatgttctccctgagtctggggtttttccagcatcagactggagaaaagtatgtgctcattgggtcataggtggccatgagcaggcacagaaaaggcaacatatgttcccattctggtccgtaggactggtggcctagcctacgggcttcaggccctccttggtcagaaggtggagcctcaccagtgaccctcaccttcctgtccaagattctgcctccctcccaccaccaaccatgttgcccaagtcacttgtaccaaggagcatccaaagaccagcgctgatctgtccgcaatcccccctcagccccccttctatactcatcagggcccaaagtccagagggttcaaggcagccatgggatgctgtatatgcactgaccaaaatgttcacagacccacctgggctgtgacagcatccaggctcgaccacaaccacaccccaaaattagggcaggcgccatgagagaccaggcagtgggaacagacaccctgaagctgaaggagaagtggggatctcctgggccctcaagagcactgggggacctcagttggtaactgtgacctgggcagattcagttgcacctttggagctgctgccctgccaactcgagaggaccaggactccctcttgtcccaggctcccatcagctccgaagtgtacgcagccttggctgtgccctctctctgtgtttccccacagagaggacaggtgagatgcaggttcacagcagctctgaccaaccccgcacaaacaaacccaatgctcctgggtgtggtttaaccagccccaactgcactatcatccaggagcttgcaggctaacagcaggcagtgggcagtgaggtagaggctgtggtggagactccagacctgggtccaggttccattttgccatgagagggtgtgggtggcacagctggctgcctcagggacatggagcacaggcctggctcatgaccctgccaaggggggggcctccaggagtggttcgtggttcccaggcccagcaatcagactccatggtctcccctacagggggcagatcttggaaaaacagcctggggtggatccgcatggaacctcccttcaagacccaggagcttgacactgttaacaggatgggcacagtggccagatagctcaacaggaccttgaagcaggtgccacttgtgcttctcaccctggccccctgatggatggccccagctctgttttctgggcctggcatccacacttcttgtgcgagcggggcaccaccccattcctatcttctccttggggcccctctctgcctgtccctttgtgcctgaccgagctgctccctgcaggcaaaaaaaggaagaaaaaaactgatgactgaagagaagtaaagaatgggtggagatcatctgcacacctgttttcccagcactttgggaggccaaggttggtggatcactcgaagacaggatcttgagaccaggctgatcaacatggaaaaatcccatctttattaaaaatacaaaaatcacccaggcttggtggaatatgcctgcagtcccagccatttgagtggttgaggcacgagaatcacttgagccctgaaggacaggattgcagtgagcccagattgcaccatcgcactccagcctaaatgacaaactgagattttgtctccaaaacaaaacaaagaacaagaatgggtgggaaatactcaaaatgatctaatttttatttggttgctttgatgttctacaactgaaactcaatcacagacaaattagtatttcgttatttttccatccgtaactcgataactagagatttctgatggataaattgcacaacaggttaaaagttttcattcaggtgctctttattgctgatattccttggtaaccatccttgcagggataacagtctcatcactgtagaactttagcttctctttccgactctaggacacgggtccctgaagttctcactgatgtcacctcaacattttcctccaaccttgccccctgctgttatgttttttccctcacactgaacacttgcctgtgcttcctttaagttgcatgtggcctggacacagtcactcatgccagtaatcccagcactttaggaagctgaggcaggaggatcccataagcccagcagtttgagaccagctggagcaacacagcgaaaccctgtctcaaattgtctttaataaaaattttggaattattaaaaaatgaaataaataagaaaagagaaaaatagtttgcacccacatagtagattttagtgtccaagtgcctggaagagaactttggatttctctaccccactgggcacgccttccctagcagcaaagatggagctccagttcctcagacggtgatgagccacaggaagggcagggggtggggccaatgaagatcctcttgggctgcctgacttccctcagtgtacacatcagctcagcccgaagtggggtgaagatc

SEQ ID NO: 117 - DNA, 1691 bp, Homo sapiens
actagtggatccgtcgacggccattatggatggatggggagagactatggcgctcaacaagaatcactcggagggcggcggagtgatcgtcaataacaccgagagcatcctaatgtcctatgatcacgtggaactcacattcaatgacatgaagaacgtgccagaagccttcaaagggaccaagaaaggcactgtctaccttaccccttaccgggtcatctttctgtccaagggcaaggatgccatgcagtccttcatgatgccattttatctcatgaaagactgtgagatcaagcagcccgtatttggtgcaaactacatcaagggaacagtgaaggcggaagcgggaggtggctgggaaggctctgcttcctacaagttgactttcacggcagggggcgccattgagttcggacagcggatgctccaggtggcatctcaagcctccagaggtgaagtccccagtggagcctatggctactcttacatgcccagcggggcctatgtctatcccccgccagtcgccaatggaatgtacccctgccctcctggctacccctatccaccgcccccacctgagttctatccaggaccccccatgatggacggggccatgggatacgtgcagcccccaccaccgccctaccctgggcccatggaacctccggtcagcggccccgatgtcccctccactcctgcagccgaagccaaggccgcagaagcagccgccagcgcctattacaacccaggcaatcctcacaacgtctacatgcccacgagccagccgccgccacctccctactacccaccggaagataagaagacccagtaggccctcctgcctccctgcctcccaccctcatctctctaccctacccctcccatcggggctgtgctggggcttggggaggggagggggcgccttgttctccctccaggtctgatcataaacaattaccaggaactagcattgtgggacattagggcccccggcctcgggagaggtgccgcccagcttcccatgccagcccggagcccacagtgctgcccagcgtacctccctcaccgtctggggctcttctgggagcacggagcatcccctgttcctgtttcacctctcagcttctcccctcgaagggactctctggccacctcctccaccgcagtccagctccctcagtctggcacccactgctacactcagcctcatgagccacttcagaccagccaggtgtcttcccgggccctgccagaccctgctcacattccctctgctggtctgtgctggtctcagaaggccaccgcgcccgcattccactcagccagggtccagctgcagcccccgccacccttccttcccttccctgtcctgggtcatgttgttgccaccctgtgtgacttttgaagctgtaaaatgagcttccagggcttgggtggcgtcggggcagggccgccgaggctgggaggaagcccttctgccttttgctggtgtttctggaatttgctttccctcacctctcacttccttctagaaggagcttcctgactggaaccagagaatgcatgtctgtccacttggtggctgctgggtggggccgggaacaagggcccctgaccctgtgtgctggccgggacctgccaccagccccccagcctgcttcttccccttaagcttatcgataccgtcgacc

SEQ ID NO: 118 - DNA, 1339 bp, Homo sapiens
cttgttctgtgcatcttcagaatcccccaggccctctcttgatccttttcatgaagtccagagcattccttctattacaggctgaagatgcattgtaaaaggtaatgctataatagtattccctcttctcaataaatgtgcaaaactggagaatctggtgctgatctgcagcatacttgacaacacagggaataccgtggatgttccacgccagccttacatccgtccccattgcctgcccatgtccagtggccctgcgcaacaaaagtaagggcttgtcttaccacactctccccagcatctagctcaaggtagatgactgactgggaaattccggttggataaaatggcttttccacattgcaactttgcatctctattaggaaaatttagattgaacctttcctctacttgatgcttagtttgagaacagttttcacaactttagagggtctctctcagagtatgttatactgtaaccttgaagtttgagatgaaacaaggtgtcagaggttttgaatctttcaaaggaattgccttttacagattttttttttattccctaagaagggaaaaagagagggaagaactacactaatgttagagataaggtatgttttggctcaaaatgtgtcatgaacctaaaggtaacttgatgggcagaaatgtctcagccatgtgaaccaagaagtgggaccacagtgcaaggctgtgggtggcagcactagatatggtggtggcaggagtgtgacatgtaggcactccatgggggacagctggacggtgtctatcaaaagtgcaaatgcgtaagctctttgaactagcaatgctactcctaagaattgtacctgtgtacaaggtacttgtgtacaagagtttttgttgaaacattgtaatagcaaaaagttggagagtgccaccaatacaggggaatggttaaatacattatggccagcttaaacaatggaatagtttgtagaaatttaaaacaatggatcctgtgtgtgtgtactaccatagaatgggccccaagatgcatgattaagtgaggaaaaaagcccatggtatcctaatgtttggaatggagaaagtgtgtagatgtatgtgtgtgcatatgttttcacacagacgtatacacgtgtatatcatatgtccacctgcatatgcctaggatgtctctgggaggatatctagcagcccggcagcctgaattgcctctgggaagaggggtgggaatgacttttcaatgtacaccttttgtaccttttgaattttgtaccatgtacatgtattatctataaaaaaatagttcttaatttttaaaaaaaaaaaaaaaaaa

SEQ ID NO: 119 - DNA, 2100 bp, Homo sapiens
gaagcgcgctcccggggaggtgttgcagccatggctacggcagccggcgcgacctactttcagcgaggcagtctgttctggttcacagtcatcaccctcagctttggctactacacatgggttgtcttctggcctcagagtatcccttatcagaaccttgggcccctgggccccttcactcagtacttggtggaccaccatcacaccctcctgtgcaatgggtattggcttgcctggctgattcatgtgggagagtccttgtatgccatagtattgtgcaagcataaaggcatcacaagtggtcgggctcagctactctggttcctacagactttcttctttgggatagcgtctctcaccatcttgattgcttacaaacggaagcgccaaaaacaaacttgaagttgtctgaaagcttgctctacacttttacattcatcctcacccttttttttgtggggtagaggaggtgcagtaatttactcagtgatctttctactttctagaaactgtccttcaaagctctttaagaccccctcgttagtcagttttttctcttatatgctctggttgagcttgaatagaccagttgttacttaagaaagaaacagagaaagattttagcttttcaatcctatttggcagaggacttcagctaccttcttacagtctttggctgtgttggtaccctcgtgtgctctgagctaagccacatactaaactgactttttggtttgtatacccttgctcccgccttctgatgaaaacaccttaccctcacaaccaccatctttcctctcctttccaaagctctttccaccttgctgcactaagataaagtgacactttcactatatgtcaattccacacacatttattaggtacctgtgaggtaggatcctatcctctcaaacttccatttctcatgctacagagaaagataaggaagatgagcaagtgcctggaatggggcaggctgagcagtcacacaggcatagaggcacgctgagaacctggaggggagactgcagagtgccttccctgatgctgcagccggaagtgatccttccctccacctggcccctgggacactgtgctctgcagtgtgcagggcctgatggcactgctagattgctccttcagctcagggccacagcttaaacagctttacctttcccctcagcacctgtcccactatcttgcacacaggtgctctaaccatgtttattgaacaaaggagggaaactgatttcactttcacttgttcattatcattccaatttttatgtgaaaatggcacaacccatttggggtaccctcaccccaaaataaaagcccaagtctacctttgactggtaccaccttttttgtggtttcgttggtgagaaacctttatctttttcatacctttctattctcaatcacttctccaaaagtgtgtctttccagctctgatttattcaaaacacaagcatttctgtttagagattctagcccatgggttatctggctagttattacctctcctgttcacttagttatactttattattgctcacaggctggggaggcagaatgactctgtcaccactaggagccattagggcttcttccctggaggactgcctgcttgctttctggggacactagccctcatttcccttctgtggtacagtggggcaaattatttgtattaagcaaacatttatgggaaacaacccgctcccgaaaacggagcccccaagtaaagcacaaccctgaaagattatgaactatgaattgtctctagtagagataaatttctgcaaacatatctcagtcttccctctgtttctctggtgattaagaagttcctttttggtaaggaaaaggatttttaaccatagagttaggcatcatggaaattcaaaccagatttcttaatacctggtcttcctcaaagagaaataataacagtaatagtggtgctgggaacaatatggcagattattgaatgaaattgattaacttgaataaaatgctgtgaattttctctaaaaaaaaaaaaaaaaaaaaaaaaaaaaaaaaagtaaaaaaaaaaaaaaaaaaaaaaaaaaaaaa

SEQ ID NO: 120 - DNA, 1309 bp, Homo sapiens
agaaaagcaagggcagggttcagaaagactgaatgtaaagctgggctctgagtctgccaggcccttcgtgtgttgctctgcacattaattaaagggtctacgaggtcagcaaggacgcccaagaagactcagtcatgaaaggtgaactgctcctgttttccagtgtgattgtcctgctccaggtggtatgcagctgcccggacaagtgttactgtcagtcatctacaaattttgtagactgcagccagcagggtctggccgaaatcccttcccatttacctcctcagactcgaacgctgcatttacaagataatcagatacaccatcttcctgcttttgcatttaggtcagtgccatggctcatgaccttaaacttgtccaacaattccctttcaaatctggcccctggagctttccatgggcttcagcacttgcaggttttaaatctaacccagaattcactcctttccctggaaagcagacttttccattccctccctcagctgagggagcttgatttgtcatcaaacaacataagccaccttcccacatccttgggagagacttgggagaacctaactatacttgcggttcaacaaaaccagcttcagcagcttgatcgagcgctcctggaatccatgcccagtgtgaggcttttacttctcaaggacaacctctggaaatgcaattgccacttgctcggtcttaaactctggctggagaaatttgtctataaagggggactaacagacggcatcatctgtgaatcaccagacacctggaagggaaaggacctccttaggatccctcatgagctgtaccagccctgccctcttcctgctcctgatccagtgtcctcgcaggctcagtggcccggctctgcccacggtgtggtcctgaggcctcctgagaaccacaacgcgggggagcgagaactcttggagtgcgagctcaaacccaagccaaggccggccaacctgcgtcatgccattgccactgtcatcatcactggcgttgtgtgtgggattgtgtgtctcatgatgttggcagctgccatctatggctgcacctatgcggcaatcacagcccagtaccatgggggacccttggctcaaaccaatgatcctgggaaggtggaagaaaaagagcgatttgacagctcaccagcctgagagcttttgtctcaaataggattggtcattgcaggccagaagatagtgtctgagtagggctgatgtgtttcctgttagtctgattttgcttttgccaaaagacaaaaaaaaaaaaaaaaaaaaaaaaaaaaaaaaaa

SEQ ID NO: 121 - DNA, 2515 bp, Homo sapiens
agcattttccacgtgattatcaactttacagccatcatttcaatgtctgtactattccacatggtggatgaactagagtctactcatcttttattgttgggacatttaggctttttgcaaataaaaatatttatcatagcagttccttccctcccctgatggcctcataagcctgtggtcctaggacttgactctttcccaaattagggtgcccacgcttccttattccctgaccacattcttccagcaaaccctcctggagctgagtgataggcactcatggtgggaggccccatttaacaccatccatgcagcactgatttgttataggctgctgtggggggagggggtctccaaggaaacagttgaggaaacagagagtgaggtgagcaggcagctaaatacagaaactgttaagggcatcagaaacacccatgggcatgtggacagctgtagaaatagggctgcaagacacctcagctagaatctaatgacctgagagcaccaggaaaagagaagggagttgacagtgtatgcagctaggaacacatccccgtcgggggtctgctctgaggaccctctataaccctaaagcagacagtacctctcccagctcagtatgatgtgctctatgattaatctaacatgaggcgactgtgttctccatcaaaggagagactgttcctgtgtgtgtgtgttgaggggtgaggggaggggggaacaccagggagacctttaaggatggggtggcatttgagcaggacctcgaaagatgaggaggcttttgacaaagggagtccagaggcagaggacagaacatagaactagatgaagagcccttgagggcagggacggtggacctccccctccctcccagatgctggctcaggcctggtggacactggcaaatgtcgttttgaatgagtgcccccggggggagaggtggcagcatgtgggcggtggggcatttgttggggggggcggtgagtcttcaccactgctgctcttgcccctcaggtgcagtgctttgaccccaaggaggaccggtggagcctgcggtcaccagcacccttctcacagcggtgtctcgaggctgtctcccttgaggacaccatctatgtcatggggggtctcatgagcaaaatcttcacctatgatccaggcacagatgtgtggggggaggcagctgtcctccccagccctgtggtaagtggaggcttcaaggcaggagagcggaacccgcttctaaggctctggatcttggagcttgtgaatcttgtgactccatcctaggtggttttattatacatcactctctagctcatcctcacagtgatagtgaaccatgcatttcacagatgaggagactggccttagagaggttcagcacctggcccaggccaacaactaggccctgttaaggcagagcctagaaccctgcagtcccaagtgctatagctttgagtggggatttggtccaaatgaccctgtggtctctcctgccccgaaggccactgctagtaaccaatcatgaggtaagatgtggggaagggagttgctaaggtctgctctagtgatatcagagcagggaggcccaagtcctggaagctctggcccctgcaattccctgcctcccctaccttcttctccatcccctgaaactccagagactacacagatatggttggactggaggtctctgccagttctgacctttggtgaccttagaggtgagatttctggcttgagtctgagattctaagatggcggcagtcgagattattgttattggtgtgcttaccacattccaggctctatgtaaaatgctttatatgcttaacttccattaactgttaagggaaccctgtgaagaaggcactttagttcttctccctttgccgatgaggaaactgaggtccagagaggttaagtgacttgcctaacgccattcactgaataagggtcaagctagagctggaactcaggtccatccagtttcctgcctctctacagtccagattgcctgttcacagcctgtgggtcaaggttctattatctggcctggccaggcagggacagaggaagccccaggctggacctgatagttgtctttctgtttgtccacccaggaaagctgtggagtcactgtgtgtgacgggaaggtccacatccttggcgggcgggatggtcgcggagaaagcaccgataaggtcttcacctttgaccccagcagtgggcaggtggaggtccagccatccctgcagcgctgcaccagctcccacggctgtgtcaccatcatccagagcttgggcaggtgattcagatttggacagcctgagccaggaggcggagaggcaggcggagctcagatgcacactctgctccctcatggcacctccacgcaaacagcccttaacttaatggtcccttttcttgtataaataaaatcttgttgggtctgtgttccagctgcagtctgccctgcctggagatgcaaaaaaaaaaaaaaaaaaaa

SEQ ID NO: 122 - DNA, 5147 bp, Homo sapiens
gttttctaaaatgagagccgtcagaggcagttgaaccagagcgactccatcttgattaggggctgggtaacaaaaggctgagacctactgggttgcattcccaggaggctaggaattctaagtcacaggatgagataggacatcagcataagatacaggttacaaagaccctgctgataaaacaggattcggcaaagacgccagccaaagcccaccaaagccaagatgggcacaaaagtgacctccagtcatcctcactattcattgtgcaccaactatattagcatgttggagtcactcaccagtgccacgacagtttacaaatgccacggcaacgtcaggaagttgccctatattgtctaaaaggaggaggaattctcggttccgggaactgcccaccccttacccggaaactcatgaataatccaccccttgtttagcatgtaatcaggaaataactataagtatattcagttgagcagcccatgccgctgctctgcctatagagtaggttttctttttttgagatggagtctcgctctgttgcccaggctggagtgcatttttgcaaccttgggtcactgcaacctctgcctcctgggttcgggagattctcctgcctcagcctcccgactagctgggactacagacatgtgccaccaggcccagctactttttgtatttttagtagagacagggttttgccatgttggccaggctggtctcgagctcctgacctcaagtgatccgcctgcctcggcctccctaggtgctgggattacaggcgcgagccactgcgtgtggcccaaattctttcttgcttgagatctaagaaccctctcttgggatctggatcgggtcccctttctggcaacagagtcacctccttcaagaggccctgatgtcctcagcaggtcgctaagggcctgtctagctccctgaggcccaaacactgtgccattttgacagccaggggccccaggtccatcttgaggctgtgaacatgctggctgtccaggggtctgtgagctggtatcaggggagggtggggcagcaaagtgaagccgctcccagggcagaagcctccatgcccacatccgggaaatcttcctctcggaggccctgcctgggaggcatctgcaggcgctcccccgctcatagaaggtctgctcatccagcccacccctgaagtcactatcaggcagggggtagggcaggccatggggacctacctgccctccatgcattccaaagaatcgaagtcctccatagggtccaggtcctcttcagagtcagtcatgccaagaacctccatggtcgggggttccaggagctgctcatacaggagggtctccatcaagatgtctctggagaggggtcttacttcagacatttctcctctggggcaaaaagacagcatatgactggacccctaagaactgagcagtctgggggctctctcacaggatgacccccagattgtatagccctactcaccagctcttttgatccgctaaagccgtcaatatcccccaaccccagctcccacaggcatgaatcctgctacatgctggctgtgtgcctctgggcaagtcgcctagcatctctgttcttggaagggaggaacttgaagatgattcataagggccctttctttctttctttgtttttggatactgagtcttgctggaggctggagggcagtggcacaatcttggctcactgcaacctctgcctcctgggttcaagcgattctcctgcctcagcctcccgagtagctgggactacaggcatgagctatgcctggctaattattttgtatttttagtaaagacgggggtttcatcatgttggccaggctggtcttgaactcctgacctcaaagtgatccaccccacctcggcctcccaaagtactgggattacagcactttggattaatttattaaatacccattaccctctaccacaaagaagggacctaatctgaacctttaaccatctggcctctgggcccaggccctcagattgacttgatatgaatggcaaagatcccatcaccaactgggcctaggctggccttagggcccagatctgcatgggaaaagtgtggagccagggagtggaaggtggggagcctgcccaggagggtccttgcagcagcgacctcctgctctggtctctcctggccaccccaccagcccaagggaggcccagtcctgtcagctcctacctggcaccagctctgaatgccttactggtctccagccttcagtggagctctctccaacctaatctcaaggtagcagcctcaaccctgaccctgtcactgctctgttcggctccctagacctggcctggtgcagtgcggctcatgcctgtaatcccagcactttgagaggtggaggcgggtggatcacctgagcttaggagtttgagactagcctggctaacatggtgaaacgccatctccgctgaaaatgcaaaaattaaccaggtgtggtggcgctcgcctgtaatcccagctacttgggaggctggggcgggagaatcacttgaatccgggaggcagaatatgcagtgagccgagaccgcgccactgcactccaacctgggtgacagagcgagacttgtctcaaaaacaagtggggggttgtgccacatccactaacaggccctccccctgtggccctgccaccccaatcttggttcccgctctaaccacactcaagtatgctttccatggatggtgcctggtcctgccatgcctccaaagtcttcaaatgtgcagccaacctcagaccggcccatgcctacacctattggtccttttttaaaaattaaattttattattatttttttcacagacagggtctcacccgtttgcccgggctggagtgcagtggcctgatcatgctcactgcagcctcaaactcctgggctcaggtggtcatcccacctcagcctccagggtaactcgacaggtatgtaccactgcacttggctcatttttatagaattgctgtagagatagggtcttgctttgttgcccaggcttgtctcggaactcctggcttcaactcccgcctgggcctcccaaagtactgagaggatgggtatgaggctggcctattcaggcatcaccttcttggaccctcagagtctgcttgggggcctcctgggggtcctgcagcccctgtctctgctcccctctggctccagctgaccactgcactccaggctgggctacagggcaagactccatatcagaaaaaaaaaaaattagaatggagatactagtaacacctattgcacaggactgttgtggggatgaaatgatccggcacagagtaaaccgctaagagaggggctgctgctcttatcagtttctggttgtcagcccaaggcctggcatagagcagacatatgtttgttgactgaagacatgaaggcaacctattcccagaggacccactgtgaggtcactgcagctgcagatccaggaaactggactggtttttattatctttttttttccagcaaacttgcaaatgagtagttgaaacccttctttggtgaaggaagacacacctagccatgtgtccccacccaggctacagcccgcacttagcctcctacacactcaccagtggaaacaccaggcgccagtcagaagccctattttaccctaagaggttaggatgcaaatctagtatgtgcagaaaagagtgccacacccacggccttgagggcacctgcagggctccgagtgggagggagggcaggttctggacagagcagcctacatttggtgaacagctctgcactcgacagctcgcctatggctcatctggaagatggggaaacgccatctacctcccaagcccctcccaggttgcccagaagcacaagcaagtagagatgtgttctgctcagccctcagcaggtgttcaagggccgaggctgcaggagtgtcagagcggggttgggggcagaggtggatggggctggacctgaggatgaggtcgaactcctggtagggaccctcagactctcatgacctcgcccagtcctgtcaaagccaagcaggcgggatctgacacttcctgtttcacaggcaggcaaaccgagagggtcaggggccacgctggggtcacagggagggccagctgagtgggcccagctagaaaaccctggtccagtcttccacgtgccaccctcccagtcacagcctggccctggaccatgagggtggggtggcacaaagcccttggagcgcacacaactccagtgtaacccagcaggaaacgccctgagcctgcagccaggctggacctcagttccaccccctgctcggcccctgctgtgtgaggcagaacaaccagctcacctctgagccttgcagaaacagccgggcctccagggctgctgagaggatgaaaacatacactactgcccattttccaccacctagcaggggctccataaaagctggttaacacaatcaacagccttagaagagaggagaccagaggccactcacagctcaggacgccacggtggactgaacatgttgctgcctttctggagggtagtgtgaccatcagcatccaccagtcacacacgcacatgacctttgatttctagggatgcatcccacacacacccctgcatggacctggcagccttgaaaaattgaagccatagatcacaggcaccgctgtgctgtcatcacagcccttcgggaggccgaggcgggcacgtcgcacgagcccagttcaagaccagcctgggcaatacaacgagaccccctctctaaaaataaattaacaataaaaaattttaaaaatatatgaaatgggccagccgcggtggcttacacctgtaatcccagcactttgggaggccaaggtgggcagatcatgaggtcaggagttcaagaccagcctgactaacatggtaataaaactccgtctctaccccgtttcaaaaaaaattagccaggtgtggtggtgcgcgcctgtaatccagctactcgggtggctgaggcaggagaatcgcttgaacctgggaggaggagtttgcagtgagccgagatcacaccattacactccaacctgggcgacaagagcgaaaaactccatctc

SEQ ID NO: 123 - DNA, 6799 bp, Homo sapiens
ataagaataaaaattaccccaaatttccaaatcaagaagtaatcatggttcaggtttgggcagatgttctttctaggcatgaacacacgttatctcattgtttacttaacaccgggttataaacatttacccatagcatttgaaaggtagctatagatagaaaagaatcagagaagttctaaaacagctcttgcgctttgtttcaaattctctgcaggaaagatgaggtcttcagccttttttttagctggacggcaccgttgcagcagtggtgaacagggcactggattgagtcaggaaacccagctgtgaccttgggcaagccacttgccctctttgagcttcactcctgctaaggcaaggggcgctattcgtaccctgtctgcccacctcacaggctctggtgaagtccttgatttgaacgcctttagctcccaaggttgtggtttggagatagggcaggtcacatgaccatgaagactgaaggagaaacgtggaagcacgtgtgcctgttgcttcttttccaacttaaaatgcttggtgatctcctgaagactccagcctcctctctgggaagccaggatccacagaccctttacctgcgggtcatgggcagtcccagatggtccccctccccaacagagggggtgcagtgagacctccggaagttactgcctctgttaccctcaaagggattttcagatcagacagcccccctactccaagggacgtgtgtggagcttggtacctttatttatctcctgctccaacccctgtggactgcctgcacccagaatggggcctgtcctgctggcaagtggctgagaacctccactccactcagcagggctgttccccatttaccgaaaagctccgagagaaaataactaaccccatggcgccgctgtagctactggcagagcctcctggtccccacctctagcgcctgtggtttttgtttcatgcagagtgagcagtgaatctgggatcccatcagcagtcagtttgggtgcctgcgaggcacaatgatagatgttggtgaagggtatgtgtgaggatattaattaatattaacatgctagttatattaatattctcattggaatttgtggggctttgcaagttatatttcaaatatatggttttatgtaatccttttaactgccctgaaaccttgaaattattgcacctattttatagatggagagactgaggctcagaggggtgaattgcctaagatcctgggggaggaagcacccaggttttctggttttgagtcctgggcccttcctgctgagtagctacccccaacacagacctgcccttggagagcttgcagccacactgggaaggccagtgtattggattgctgcttagacctggaaagcacgtgaataaagcttcaggttaaaaccatgggggttccaggaggcagcagtcggctctgcctgggggtgagctgaggagccggtgctctctggaacaagggtagttgggctgaggctcagtggacagtggaggttggcaggtgaagtgcaggaggtctttgcagggagtgggaccaccttgagcacacacagaggaatgagacaggcaggttactcaaggagcagaggtctcgtgaccacttcccagagcatgtggggtcctagcctcatctccaggaggagaaagtgcatctatacacagatttgtcaatggagtttaaataggatgtgggaaaatctagattttccaaaacagtacatatttgctttgagaagaaaggtagatgcaggatgcataggttagataattttaatagcagtaacctcagagcatgtaagtatgatttgatttactggagtgcctggccgtctcagtcagtgggagcacggcttgggctgggagatgaggttgacaagggttctttctctcaaatgcttcctttggtttgctaagaggtatctcctactcggccgggggcagaagacttttccttcttttcccagtttgcagtagttgggccagatttgtggaagtgggagaaaggcctgccctgcttctacatagagttggctgtcctgacttgatactcggtgtgccttccagagacccgcctccatctcctcaactccctggcttgatgcttaggtggtgatggctgttgggcacaggagttacataacagatctgtgatggacccaggagcagagccagttgagtgaatgtcatggagtgggagtggtcttgcatggctgtggtgtcccctgcagcttgtgcagggtatgtggcaagaggtgctcaccactcatctggaatggctagactggaagcacttggccctcttgggctctgcacccccaccccctcccacctggcctgcctgctcatcttcatgggcgcctggggagaccaattatggctgcttgtcatagtggctcaggtcaccgttcacacttcctgggaccaggacatcagagccctgagaagggtcaaggggccaagtgggcctagccttttactgacagctgggaaatgcaagcgtgtggaccagagcaccaagtgagttggggccggtgtgggttcagcaccgtgtccctacccagagctccatttgttgaaaacagcctttctctaccgtttcttcacttggacaactttaaactatgtattggctggtcgcggtggctcacgcctgtaatcccagcactttgggaggccgaggtgggcaggtaacttgaggtcaggaggtcgagaccagcctggccaacatggtgaaacctcatctctactaaaaatacaaaaattagcccagcgtggtgacacgcacctgtaatcccagctactcgggaggctgaggcagaagaatcgcttgaacttgggaggcaaagattgcagtgagctgagattgcatcaccgcacttcagcctgggagacagagcgagactgcatctcaaaaaacaaacagaaacctacatattttctatatttcccccaacattgaggctcatttcttggatgaacaatttaaatgtactgtgcctctctggcaatattttccaaaattacagatgtttctatactttcaccggcagctctgcctcccagaatttattctacggatgggttaacacgtgtgcaaaatgatttatttgcaaggttcgtcattgttgccttatttttaatagcaaaagattggaggcagcttaaatgttcattcgcaggggccaatgaacaaaccatggcccgtctaaacatgggataccgcgtggccataatacataagatggacgctcaacgcactgtgccggattgagcagcaaggtggattgccgagggaagaagcaggtctgggcggtgtgtctcggagctgccatcagtgtaaaagggaagagaatcaaaagtgtcttgcttgtctatgcccagggggtctctgggcagacaccgcaagtcggtgattgtgatgcctctggagggggtgctggtcatgggagattgcttgtttgctggagatcccatgtaccttttgattgctgaagcaggtgaatgtacgcctttccaagaaattaaaatgggccaggtgcggtggctcacgcctgtaatcccagcagtttgggaggctgatgttggaggatcacttgaggtgaggggttcgagaccggcctggccaacatgatgaaaccccatctccactaaaaatacacaaattagccagacatggtggtacatgcctgtaatcccagctgctctagaggctgaggcaggagaatcatgtgaaccctagaggctgagtttacagtgagccaagatcatgccattgtactccagcctgagctacagagcgagactctgtctcaaataataaaataaaataaattaaaaacataaggactgtaaccttgcctcctgcccagtgtaggaaggtcaaggttctggctacttctcaagtacaggagcctcactcaggccccagaccactaatcaaaaaatatgtgcttggttctcacaaaggggccgagtgtgagggcttgggtgttgcttggtaaatacgacccccggtcccggccttggagagatggagccctctctgggccccttggacacactgctgttggctgactttgtcattttcaacccttgctccgattggctcacgtcatgatttctgaaacctttgggggcttccccactgacagaaagatacactttaactcagcactgggcatcccaggccctctttactgggcctcttcttgagccgcacttggcctgtcaccccttcctctgtctgccctcttaactccccacctccgtgcctttgctcatatagttccctttgcctgcctttccgtccagagcagtctccacgtgcccaggtcctgtctgactttcaagggccagcttagtttccacttctgcactgccttctgacctccctggcttctgtgtaaactgcccagatcaagccacacaatggttcctgcacccaaggaagctccctggggccccctcctggccactcgctcttcgccggtagtcaccactcacaccttggcactttcgcgtggtgcctgccgctgcctgtttgggcctcccacacacagagtgtacagaacggactcctcggtgtctggctgccttcccgcagcactgtcagatcatccaggttgcctgtagtggccctttggtttttttctctgctgcgtaggagttcaccaaatataccactatttattcattctcctgtggacaggcattgggttatgtccagcctcttcggtgaattcattcttgtctttgggggcgcgtgtgcgctctttgctgggtatacacccagggtgggttgatggcttacctgactcagaatgtgtttgcatgaatgaaattcaggttggtatgagaaatctagggtgtcctggctggagccaggcttcttgattacagggacagagcaggtacagggatcctggtttagacagcctgctcccatggggtggtagcattgttggggtgcaggatgctgaatctgcaggggacctatccgctcagtgcccagtgggattttagctggctggaaaggtggtcacatgtagaggggctcaacaatccagctaaagaggctgagcgttggtccattgttctcaatttgagagaaaactgagatcatcaaaattaggactggtatgtactaaaggaaagaacctaattacaaggctgaattgagtaagccctcgctgagggactttggatttctttgttgttcccctttatttctgcacccccacccaagtgacagatatgtacatgattggatgattttgctttcctggttgagagattcctgggaacttggcccaggagaagggggagaaatgtggagccgctagagtggcctccgcttgtttgtgttgattgaaggggagacggaaggagagctgtggacccctgaccccttgtgagggcatgtgatccttttcaaaaggctcaccaggcagaagtgcctggccaggggccgctctttccctctaatcccctctggagaagggccaggctgtgggttgctgacctgctctgatgtggatcagcctcccccaataatgcagctgcccagaagctcagagagcccaggcaacccccaaaggcaggagggccggctgtcattcccgttgtcattcccaggcggctggagtgggagcagagcggtcagttcagatgaacagtgctcgagtctgaccccaaccagcgagttatggtaagatggaaggttctccatctatattaaataagagaacaaaagccctcccaggctgcatgaatattccagggatatatatgtgaacgggttgccagtttagcttggcctgtgggtggcagccgcctgagtgagcacttcgtggctgcagctctaaagggtttggatctgaaactaatgaatgaaaatatgacctcagaagatttaaagagagcaaatacccagcaacagaacctgggtcccagagactgttgggagcatgaaatcccaggctggccgaaggaggaagtgggagagcaatggcagctgacatcacatggtgccagaccttctcagtgctttctgtgttcactcattattccgtccctctctctcagaggcaggtatggctgcttccccattttatagatgaggaagctaaggcaaggagaggttgtgtaacttgctcacagacacaaagctagccagtggcaaagctggaggtcaggtctaggtggtcaggctccagagttctgcggatttcacagcacggcagtggcagtcggaagaaccatttgtcaggtgattgtgggcaaatgacgtcagcccttcaaacctctgttttgcatctgcaagctgcttgctgctgcaacaaattaccagaaacttagtgacttaaaacacaaattaggtcgggtgcggtggctcacatctgtaatcccagcactttgggaggctgaggtgagtggatcacttgaggtcaggagttcgagaccagcctggccaacatgatgaaaccctgtctctaccaaaaatataaaaaattagccaggcatttggccgggtgtggtggatcacgcctgtaatcccagaactttgggaggacaaggtgggcggaacacaaggtcaggagttcaagaccagcctgaccaatatggtgaaagcctgtctctactaagaatacaaaattagcaggacgtggtggcacgcgcctgtagtcccagttactgggaggcggaggttgcagtgagccaagatcacgccactgcactccagcctgggtgacagagtgagactccgtctcac

SEQ ID NO: 124 - DNA, 150024 bp, Homo sapiens
gatcataggggtggtccttcgtgaatggcttagcacaatcccctcagtgctgttctcatgataggtactaagtgagttactatgagatctgtttgtttaaagtgtatagactgcacctccccactgtctcttcctcctactctggccaggtgaagtatttgctctccctttgccctccaccatgatcataagtttcctgaggcctccccaaaagctgatgtcaccatacctgtacggaatcatgggcctatggaaccgtgagccagttagcctcttttctttataaattacccagtctcaggtatttcctcatagcagtgtgagaacaaactagtaaacagtgtaaatgctttgtaaatagttgttagttaaactgtactgttttgggaataatgacaaagaaaagagtctgtatgtattcagtacagaggcagccatccattttttaaaaatatctttaatccacagatgcagaacccatgagtgtagagggctggactgtatacatgaatacatattgacatctttatttctatatctatatatccaaatatattttgaaaatcatgagtttacactgatacctctagtttgaatccgataacacaggttcattctagtttactcccttttcatatttatacctttcttctctgacagtgagaaatcaggcttcctttatcctcagtatattcacttactggctaatttcccctccccattgcctataaactactcatctcccattggtgctgccaccacaatccctcaatctcatatgcatatgggtgacctcctcactccacttggtctctgacatcctgtgtgagctccctgtcactgccctcccccccatatgggtgctcttctcacccctctttggcttaaaaacccaattctgggttgctactgatacacccaaacccagacacagatgccctcctcactccactggggctgcaatccctcagactgggctgctgccactcctgcccaagacctacctcactctgcccttcttaatgactttgaactgaactaatcaaggaggaaggaaggaaggcacgaatcaactaaaatatctttgagacaatttggaacataagtaaatctattttatagctctttagaacagctaaaatgttcttcatgatctcacctggtctacttatggtggagtcaggtgagtgcgctggaatagtgtgctcttaatgtacaagcatatgctttcaatttacaagaggaagccttcactgaaaattccactgtcaagcagcactgatacatggccttgtaaaaagaaagctctgtttattggagtcaacacaattattgtatccagggtaaagactttttttaaatgaaatctcctaaaatgatctttgagttcgagtcatagtaaggaattgatgagtcgtgccaaggaggcctataatgttatagaagacaagctgggtagaaagtatttctctctcagaatgaattgatacctgtagcaacaccacatctaatagaaaaacaatgttaaagcatctcaaagcactactgaaaaatgaaaaacattactatagtgaaaaaatattgaaagaataattagaaatacaagcaccagcacatataactacttctaaataatgtatataacaatttttggtaatggtggccagtctacttatgtgtagactgagaaagaaatataaatatatgtatctatgtacatccttcaaaatatatagaaactgtgactattttaactatttgtgtcctaaaactaaaaggtacagcattaaaaatatagaatttttttctatcaaagtgacatataatcactataataaatatgatacaggagaaagagaaaaatgcaatcatgtattgcattttttaattaaattaaacttctgccacccaggtttaactctatctaatattttggtatatttcctttcaatcatattgtctgttttcagaaatgggatcatgctatacatactgcttatgttttgaattttttcccaatgacacatcataaacattttcccatcaccttggatatttgataacataattttaatggctatgtagtattttgttgtatagacacaccataatttatttaaccaattttctattgtcgggtatttaagtggtttctaattttggacattacaaatgatgtggggggggggttgggttattttattttatttttttctgagacagggtcttgctccatcactcaggcctgagtgcagtggtgtgatctaggctcactgcaacctccacctcccaggctcaagcaatctccaagtagctgggactacaggcacatgccaccattcccagatacatttttcaaaatatttttagtagagataggatttcaccacgtgcctaggctggtctcaaactcctgggctcaagcaatccacctgcctcagcctcccaaagtgctgggattacaggcatgggtcaccacgcttggtcaaaaatgttttaataaacaactgtatataaatctttgcttgcatctatgattatttcttcagaataaacgtttagtagcagaaattgagttgctagagcaaatagtgttgtgcaaaattatgttaacagatcaataggatatgcagaagagtaatatactttcctaaagtatgtgacagttgttgataaatataattaatttgaattgtcagtgttttggttgaattgtgtgcttaacaatctctaggaaaactaaagaacaaactgtctgccaaaagtctcagagaaacaggattattactttgatgctggttccaagggcctcccttagctttcctggtaataaattattgtctcatatcacactggcagagaaaacagtaaaatatttattttggaatatctgctttctatctggcagggatttgacattttaaaaccttttcaaaatattttagaaccacaaaatacagtaagctttgaattaagaattaattagggttttctttatccctactgtttgatcaatttttcaaaagccaaaaaaaaaaaagtgctacacagaatacaattaactgttagttttcagtaattttaaagtgtgctgttgcttagaaggcagactggatcagatgacctcttgggatcctttcgagctcagtaattctaacttttatattcaatgagttttatcttgcacttatcacccattgctcaacctggccctttcctctttaccacatattttctttatgtcttaattttccttttatactcacagagggtgtctaaccctttattggtataattatggaaatgtttttatgtgaacattaatctaacaatgaaggagacaagagcagaatgccaggttcagtaatgcttatgcagtcatgagcatgaaacactcttagaacattttattttatttatttacttttttaagacagggtcttactcttttgcccaagctggagtgtagtagcgcaatctcggctcactgcaaaaccccctccccggctcaagggatcctcccaagtcagcttcctgaggagctgggattagcatgtgttaccacacctggctaatttttgtatttttagtagagctggggtttcatcatattggccaggctggtctcaaactcctgacctcaagtgatccatccatctcggactcccaaagtgctaggattataggcataagccaccatgcctcttagaacattttaaaaaattaagtcttggcttgaaatctgatgtagtgtgactatacttgagaataataggaaatttcccaaatgctaaagacttaaagtacaagagaaagtcagtgttcttttttcatacataactttctacaggaaagataaaagaaaaactatcacaatattatgtattatttatcctcgctagtttatcaaacaacagttttgtaatttaatgaaattcctgttttctatatgagtatattgctctaacatatgctgtatatgattaatgtttcatttgtttggctagttactgctcattgctctgtgtgtgtgtgtgtgtgtgtgtgtgcgagacagagagagaccatgttaaacacagtattattcacctgttgttcgcctgttggttaacgctctggtatccatgtcccacttaacctttcccaacagtctacacttctattggaaatttattgttactctacccccaactatcccattatttcagggataaaatgaatgacatgtactgcgcccaagaaagtcttattgccctcattgcagtgattagatcagtcatgggtctgtggtctaagtcaagtgcgaatttcaggatttttgctgacaattctggaacacatgtttctttctttctgtgtagtgtgggatgtggatgtgaagggagaactgctatcctcactttgccaccatatagtatgttcacctcagaatgaatcgaacacattttctctgactttacaatacaaaaaaatgtttttgaagaattgccaggcactgtggctcatgcctctaatctcaacactttgggagaccaaggcagggagattactaaaggccaggagttcaagaccagactggccaacatggcaaaatcccatctctactaaaaatacaaaaaaattagccaggcgtgttggtgtatgcctgcagtgccagttacttaggaggctgaggcatgagaattgcctgaacctgggagatggaggttgtagtgagccaagatcatgccactgcactccagcctgggtgacagagcaagaccttgtctcaaaagaaaaaagaaaaagcaaacaaaaaagaagaaattgggcaggcccagtggctcacacctgtaatcccagcactttgggaggctgaggcaggcaaatcacctgaggtcagaagtttgagacaagcctagtcaacatggtaaaaccctgtatctactaaaaatacaaaaattagtcgggcgtggtggtgcacacctgtaatctcagctacttgggaggctgaggcaggagaatcacttgatccccggaggcagaggttacagtgagctgcgactgcaccactgcacactagcctgggtgacaaagcaagacttgtctaaaaaaataaataaataaataaatccaacacacaagaggcaaaattaaagagaaatttaaccctgattgatctgtacctaaaagaataatttccctctattgtataaggaagtttgaattaagcttttggttacttgcaactgaaaataaaactactgcaggatctcagacgtggatatggccttggaagcacagaagaagacaaatggttctggccttctccagaaacaataccttgtaagaacttcttggtttaggaagagactaaggaaagtataagaagaggagatcttttactttcattcattgttactgactttttgcttagttgttctgttcattattgagaagtatgtttaagtttccaacaatgattgtggatttgtctatttctgtctttagttctgtcagatgtttgcttcacacattttgaagctctgttaattaggcacatatacgtttataattgctccattttactgatgtatttgacttttttattagtatgaagtatttgtctttgtctctagtaatacttctttattgaagtctattttgtttaatcttaataaaatcactccagttttctccagttttccatgctacatatttttctatccttttacttttaatctatttgtgtctttgcatttaaaatgcatctcttgtagacaccttataattggttcttgatttttttttaattcagtcttacaataatctctgccttttggttgtttagttcatttacatgtaatgcagcaaaggccaggcatggtggctcacacctgcaaacccaacactttgggaggctgaggcaggcagatcgcttgagcccaggaattttagaccagcatgggcaacatggtgaaaccccatctctactacaaatacaaaaattagctgggcatggtaggatgcacctgtagtcctagctacccagaaggctgagatgggagaatcacctgagcctgggcagcagaggttgcggtgagccaagatcatgtcactgcactccagcctgggccacagagtgagaccctgtctcacaaacaaacaaacaaacaaaaacaaacaatatttaatgctacaaagaaagttaacacagcagattatttttatttacttcttgcttatttctgtagctataacagtgactcttggtctaatgctaagaactaaagtactgtaatgtttacctcgtactaggtaatgatgtcattctatacacccaatccagtaggtcaatatgaaccaggtggtcagcagatttaaagtaaacatgaagattcatgatgtgcacctggtacctgctttggggtatgcacaatggctactgatgtggcagttatgtattaatgtgacacgctctcttcaagaatcttggactccaagccccaaatgggctttcctgaatatggaaatcttgtatatgtctttacaatttgaagctggagagaggattacaccagtgtgataatcttagaaagggaggactcaggaacctgcacatgatctctctagcctttgcctaggtatatatttttcctgctgttcctgctctgttatcttgtgctatgataaacttcagctatccggtttaacttcatgctaagttgtggtgagtcctccagtgaatcacccaactagtgggtgattatgggacccctgagacagatataattattgagatggtggtatttatttatttttttatctttacttttatctttgagacagactcttgctctgtcacccaggctggagtgcagtggtgtgatcttggctcactgcaacctccacctcgtgggttcaagcaattctcttgtctcagcctcctgagtagctgggactataggtgcatgccactatgcctggctaattgttgtatttttagtagagatggggtttcaccatattggtcaggctggtctcgaactcctgacctcaggtgatccacctgcctcaacctcccaaagtgaaagttctgggattacaggtatgagccaccgtgcctggctgagatggctgtatttagatctgccattctgctatttattgattacttgctcagttattttttgtttctcttttcatgctttggtttgtgttaatcaattattattttattttagtgtttaatttgttcttttctaataatttctattattcttttgagatttcctatctgtttactacctttcatattttcctataattcttacaatatattttcttttaatcttttgacaattttaataatagctactttgaagtctttttatgttaaattcaacgtctgggtccactttcagtcaatttctattgattgtctttttgcctatatatggatcacactttcttgttttttcagatgtctaatacattttggttgaaaagtggacattatagataacatgtagtagctttagaatctattgtgttctgaagattattagtcatttgttgtattaggcagttggaagttaactcacctggaatcaaattgcaaactttgtcttccctactattcaaatgctaatatctttgcctgtttttatagtctccagctgctgcttttttttttttttttttttttttttttgagacggagtctcgctctgtctcccaggctggagtgcagtggcgcgatctcggctcactgcaagctccgcctcctgggttcacgccattctcctgcctcagcctcctgagtagctgggactacaggcgccagccaccacgcccggctaatttttttgtgtttttagtagagactgggtttcaccgtgttagccaggatggtctcgatctcctgacctcgtgatccgcccgcctcggcctcccaaagtgctgcgattacaggcgtgagccaccgcgcccagcccagctgctgcttttttaaaaaaccctggccatttgggaggtttcctcttttcctgcataatttattagtcaaccaaatatttggacagagaatatactcagactttatggcttctctgtgacttacttgcttctaaggatgcctcctcaattctaacttctttgccaaccttggactctgttctcttacccatcaagcctgcaaggctttagctttctgctacctgagctgcacattcttggagaataaatacactcagctgaaaagcagaaaactcattgatcttactctgggtcattctattttttgaaagtaaatttctctctggtttctgcctgcttttatactatgttctttaggtctcccacatgcatgctcagtatagcaggtgaattgatccaatgagtttttaatttcagatattgtatttttctcttctagaatgtctagttggttctttggttatgaattcaaattttcttttaacacacatcttattcttttttatcaactttcatacatttttgacatatcaatcatggttagtttcaaatcattgtctgctaaatccaacatgatgtgtctacttctattttctgttttgatttttaaatcaccttttcctgtgtttttgcatatctagcaattttgactgtattctgtaggatatatataaatgaatcatagaggctccagatggcatcttactccaccatgagtttctcttttcttctgtagatagggtgagagattgattacctcaatccaaccaggggtttagctggattgggaccacattgtaatttcagtaagctaggtcttctctggttcacccctattccttagacatgttcctccaaggctgtcgattgagaccctagaagtctttgtctctttagtcctgaaagagtacagcacattctattctgctctttgaagattccaagcttcaaatgtggcagattgtcttgaggtagaatccagttatgtgcttgaagcaggccccttctctctagtaggattttgtctcctaaagaatgcagaattattgatttcgttctacttcttcaaacacagcctcttagcttctttctaataaccccagaattcaactaatgtttcacagggacactaaccacatttgctgctctccaaatttccaatctgtcataccagccttgcacagttttattggtttctcttttctccggcagagtcccactgcatagctaagcctgatgctccctcagtgcttagattcagcaaagggctcaatgaagaaaacagcaggtaattatcaacttactccagaaggacttcccattctctctggaatttcaattcatctagtctgtgttgctctcacagctctttgatgtctaaaaaatgtgatttttgtaatttatccagttttctgattgttgtacaggagcactatgcagctatgacctacttccacaagtggaaagccacttatgggcaacataatcaaattggtgtctattggctgggcactgtggctcacgcctgtaatcccagcactttgggaggccaaagcgggtggatcacttgaggacagaagttgaagacaagcctggccaacatggtgaatccctgtctctactaaaaatgcaaaacttaaccaagcgtggtggcacatgcctgtaatcccagctacttgggaggctgaggcacaagaatcgcttgagcctaggaggcacaggttgcaccactgcactccagcctgggtgacagagtgaggctctgtctcaaaagaaaaaaaaaaaaaagcccaaattggtgttattgcagccaggcatggtggctcatgcctgtaatcccagcactttggaaggccagggaaggcagattgcctgcctgggcaatatggcaaaacccgatctctacaaaaaaatagaaaaattagcccagcatggtggtatctgcctatagtctcagctactcaggagatttaggtgggaggattgcttgagcccaggaggtggaggttacactgagtcgagatattgccactgctctccagcctgggtgacagagccagatcctgtctccaaaaaaaaaaaaaaaaaatatttttttaaaggaaaaaaattggtgtttattgcagtgacacaaaaactgatcttgatattagatcatactagctatttgactctagataattcacttaatatctcttagggataatagtggctacttctctgggttcttatataggtcaggtgaaataatatttatataaagcactttcaagatgcaaagtgctttacataaaaagcagtcctttcattcattcaaagtcacttattgaatacttaatatatgctagacactttactaggaggtgggtgggagaaatgaataagattggaaaacatggtctcacaagaagctcgtaactctagcagggaagaataatacataattaaataacagcattatatttttactattgtagatgtaggtataaggtaaaatggcaccatagagaaaggagtaactcagtatactctgatagcgaagagaaattataggacacttcccagagaaagtgaggatttagccaaatcttagggacttccaagtgaaaattaattcattgttgtagagactacctgttgtctacctgaatccattctctatctgttccatagaagacagtcatagttggttaaatagctatgcagctagagaatataatctcatcctgccttgtacctaggtatgatatggccatatcaaagttctcacttagatgaaaataagtaaactttgccatgtatggatcctggccttaaaactatatatatatatgtatattatagttttaagttttaaactatatatatatatgtatattatagttttaagttttaaactatgtaaatacacacatacacacacacacacacacacacacacacacacacacacacattctccatgctgcttctctctttaagagctagagtacaggcagtcttattcttaacttcgccatgcagacaaggatagcaacctaggagacagctgagcagcaagatgaaagaaactccagtccctaaaaggtcatatgcgtcagagacatcctactaactctgactgctcacctctaaactgtttcaagagagaaaagtaactcctgttttatttaagccactctattttggtaactttttgttacagtatctcatctgtacctaattgccctaaataaatacttacaaaaaacaatcagaaaaaagatgaacaactcaaatggaaaatgggtgaaggccatgaacaatttatgtagatggccaataaacatatggaaacaaatgttcaaacttacgattaaagaagtacaaatgaaaataagatgtctttttacctatcaaatgattatatgtacataatacaacctagcaattcacttcaaagggtatttattttagaatatgggaatatgtttagagttactataatttatataagtcagaattcagaaataacttatattctcaataccaggttactgagttaaataaattattgtatagtggaatgatattccatcattaaaaaataatttggtataggcccaaataagagtaatcccagctgactggacagtcatgtttgaatgactatatttgtagacccagattctagatacagaaatacactttaagagattgggcccaatgcaaggatcaaaaaaataattgtcattcttttccaaaatcttattagagggaaaaaacatccctagaagttatgactgtaacctggcaactaaaaaattacatgatttgtgcaggcccctgcctgagaaattattccatgaactgaagtttaactgaagtggttatgattcatcacagaggacccataataaaaacatagtgagtatttttctgaggcttttcataaccatgaatcaatgacacaagttctggaatttaactttgaatgtggcttcaaattctagaggacaagaagtgtaagtgaactttgtagcgcccttggtgttgtgttggtttgttttctcatgctcatcaataatccacagaaagaaaaataacaaatctcactttgctgttgtgttgagttgttgcctcttataaagtcattacccaaaagtaaatggagaatataagataattggtctaaatttattttaaactgttattttttataaggccaaaccaaatgtgatgaaaatgataagattttaaaacaattaaatgaaatatggaaatgggaagaccatcttacttcggtttcagaacatcctagtaaaatggctaagtatgtagaggcatgtttattgtggtttcattgaaaggctttgcctactaaagagtgtttgattattcaaaatatctcaaaatatatagtttacagaaagattcggagaactatgaactgtggagggaataaaaccttttttttaaagccacataatgaaaccaccaatgaaacaacaatctacttcacagcaaagtggaaaaacatctgaaagaacattttcaaactcaatggggtgacagtgcactgtgaaaaattcctccaatgaaatttctaacattgtttaagaatgctttgtgttggccaagcatggtggcttatgactgtaatcccagtagtttgggaggccaaggcgggaggatcatttgagaccaggagttcaagaccagcctaggcaacatagtgaaaccctgtctctaatagctgggtgtggtggcatgcacctatagtctcagctacgtgggaggctgaggtgggaggatcacttcaccccaggaggtagaggctgcagtgagccccatgattgtgccactgcacaccaatttgggtggcagagtgagaccctgtctcaaaaaaaaaacccacaaaaaacagaatactatgccttcatattgcacaataacataatttatacttccagaaagacagcatttattattaaaaacagcaaatgacaatcatcattaatttgttttactattattttataagaaaatatttaaatatgtatagctattttcttatgttgaaaaatatttaaaatatttttaatagcaaataatcaacattaatatttgttctcagttcatactgagatattatgtaagaaaaatactaatggcattgattacgatattattaataagctaatatatgctattagataaataactattaaaaattaaaaccattatgcttctgacaagataaagtacatctatgaaatattggggttttatattcatatagaatgttgctgttgaaactagcttcacagagtttatgaactcaagaatattttttatttctctgatttttgccagaatcaacatgacatgaacgtgtacattgtatctctgtgaaagaaaagaggtgcatattactttgcagatacttaagttgaaatgtttatggaattagctaatttagattcaccttttttactgcatgcagatttctaatatctctagttctatgtctttcaagttttatttgagtaaattcattctttctagtttttgcttttaaaaattattttatggaagttcatttatctacattagaggatcttcacagtatattaaggggaaatggcaggctatgagcttattttgtgcaaatatgatataaggatagaaaaaagtctatagcggatactggttgcacagtaaggaccacttgaggagcttttttttttatttttgagatggagtctcactctgtcacccaggctggagtgcagtggcacgatcttagctcactgcaacctctgcctcccgggttcaagcgattctcctgcctcagcctcccgagtagctgcaactacaggtgcgtgccaccacgcctggctaattttttgtatttttagtagagacagggtttcaccatgttagccaggatggtctcaatctcctgaccttgtgatccacccgcctcggctaaacatccaatgaccaaaccctacctcagcctgattaagtcagaatctctgagtgggtgtcctagacatctgcttcaatagctccccaggtcagctaaggctgagaactactgatttagaagcacgcacacagcctccctgaacacacacacagagtacatctacctgtaatgtggatcacaggaagttttatattcttcttttggcttatctgctttgtctacaataaacatgtacattttcctaaaatacacatgtacttgaatgcacgtagatggaagggagggagagaaggtgaaaggaaagatttttaaattaattttaaaaaattttttgtagagacaggagtctcactatgttgcccaggatggtctgagactcctggccttggaaaatgcttccacctcagcatcccaaactgctgggattacagatatgagcccctgcacctggccaattaaaaaaaaaactgttttaaacaaatgaaccccacgtcaacacagcaaggatgcaagacaacagtgggggaaacacacatggtgtctttctgccgtcctcacaggtggctgaaaaaagcttcaggagcagaagagtgagtcagaaggagctcacatctgctgagtttctgtcatgtgtcattgcttaatttttcactgcctttaattcccacacctacctcgcagggttgatagatgatttttctcttatagatggggaaatgggctctcagacagatgaagtcacttgctgagtcgcatggcaagcactctgacatacgaacactgtctgagccaaagtcactacctgactcctaaaactcaccttctgtggtgaggaggagtggtggttggcaccagggctctttccttttgtgtaactaacagaaagctgttaatctttcttgttttttttttcactttcctggaaaattgatacttcattaaagctttctagatgccacttattctacccaagaccaccttctgctgcttatttttagatgactacagattcttcattcactatggaagcttcacaaatcactttgtcagacaaattgtttgaccttccactggagagcagttgttaccactttctaataatggcccataaacatattttttaaaaccacccggattcctttgaaaacatggccaggacaaagtcttgtcacttgtgtctaaatgcacggtaattttgctgtcagtcagcatgatttgacagctgacagcagttgatgataaacaacaaaagaaaaggagggtctaagtggcaaaagctacagaagccagacagaatcaagcaagaagaagatatattttagaaacaacagctctaataactctaataagtaaattaaccatttaaaatagtatgtcaatcaagttttttaaataaatgaagctgtggagtccagccttctttttcacatgcttttttttttttttttttttttaaagaaaaccagttttgctctgtcacccaggctgtagtgtagtggtgtgattacagctcacggcagcttcgacctcccaggctcaagtattcctcctgcctcagcctcccaagcagctgggactacaggtgtgcaccactacacctgcctaattttaaaaattttatatagaaatggattcttgctctgttgcccaggctggtcttgaactcctggcctcaagtgatcctcccactttggcctccccaagtgctgggattaccagcatgagctaccacgtccagcttcacatgtttattaatgccgatgctgtatatctacatttcagtaatatatatttttgattaaaggaaacattttaagttaaaaggatcagcctgagcaatatagcgagattccactaaaatatatatatatataaactagccaggtgtggtgtctgtggtcccagatactcaggaggctgagttgggaggatcacttgagccccgagtttgaggctgcagtgagctatgactgtgtcactgcactccagcctgggcaacagagcaaaaccctgtctcaaataaagggagtgggggaagcattctgatttcttcctgaccttgttctttatcgcctccctcaagttcacattatttattggttggtggtcccaaataactttagaacagcatagtggaaccccaaataacttcaaaggcagactggcttatttgttcacagaatttcaaatatctaagatggtgcccttgaccaattgcttttccctctgatcacatttgacctctgtcttctcagacacttttattgcacatgatggtataaaaaagagaacataagctctggagttgggctgttctggatttgaatcctggcgatgcaagttattggttatgggagcttgacaataattgttttatttctctaagccttagtttctacattgtcaaagttgaaagaaaactttttccatgcactccttagaaaaatgtcagactaaacacgccaagtgcctagcccagtgcttggtacagggtaggcacttaaaaaatgttagtttacatcccacgcctgattaactttaatgttgctcccatcctacttccatcttcagcatattatcattaagacagtggttctctctgaatgttatgctacatcctccaagagactacatgctcgttggaaatgaagacaatgcccagtcttttataaagatcttgtaagccctggctccaatgatggacagtaactgatatgcatggctaacccaaacttgtagcccagtgtaatctgggtgtatgcctaggctagcgcttgtcatatcaactagctattaatatactctgttcagaaaacctggcaatggctgttacattttttagttctagcaagatattttccgatatccagtaaaaacatagattttttaaaaactattcaaatcaatacacactaggcaggatcatttgaaagtgtgctctctgcaaagtcagcaagtcaatattttaaggagggtattgattttttatttgtaaacacatgagcccaggctactctacaggaccatgctgtgggcctgttcagagatgagaccacatcattaaaaaaacgaaacaacaaccaaaaagctttgatgcgctcttggacaggatccacggcaaatacaccttcaagtaaattgccccgagtctcaaagtgttccagatgcaacatgttattttacagtcttggacagtttccaaactatctatcaactgaaaatgattcactgatctatgatataaagttctgtgtgccttgagggaaaagatcaggactttttgaaatctcatctacctttgtagatcagagcatatagtaccatgaattaagtaggtgttaaataactgtgggttggattgaacttattgatcaggggtgatatgtttgttggcagaaataattagtgaaatactttatttttatattttaatttaaaaagtgatgctcacaatcttactgcagctgagatttttcaaggctggggtactttccataagttatagagcttgctaattatgtttggaggtttgaatatagttgcacatatttagagtcaaattccttctattaataaatattcttgcctgtgagtatttctccttcaaattctgtcttcttcagtttcaaacagtttaaaacataaacgggcttaaatcaagctacaaaatgtgacttctaagccaacagttgagaaagaccatcttttctatttctacaaaaaaataatgagatgattgaacatcattccaaatgggagtcatcacctgtcctaaagattgctttaaataaacatctcattcagtgaactgataaagtggtaaattagatacattgctaattactatgttgtcctgtagctgtaagtaaaagccaagaggctgggtgcaaagtggctcacacctgtaaattctagcactttgggagaccaaggcaggaggatcgcttgagcccaggagttcaacctagagtgagggaccaattacttcctattgaaaaggcaaacatgtattataaaaagctttgatatttggccaggcacagtggttcatgcctgtaatcctagcactttggtaggccaaggtgggtggatcacctgaggtcaggagtttgagaccagcctggccaacataacaaaaccctatctctactaaaaatacaaaaaagtagccagacatggtggcaggcacctgcaatcacagctactcaggaggctgaggcatgagaatcgcttgaacccaggagtcggagattgcagtgagccgagatggtgccactgcactccagcctgggggatagagcgagactctgaaaaaaaaaaaaaaaaaaaaagctgtgatattcaatgccaacgaagcttcagtaagaccggtgctctgaggcactgctgacggcaacagaaaaagatactttcctggaaagaatttaggaagccacaaaaaagttcctagcctctgatccaacttctgggatttcatcctaagaaatttgtccaaagaggaataaaagccatgtgcatgaacatgtccattgcagcacaatttatactgacaggaaatgagaagcaacaatatggcaatgtttaaggaagttacagtgtatctactcgatggaattttaatttcaagaacaattatcggcccctgtaatcccagcactttgggaggccaaggggggtggatcatttgaggtcaggagttcgagaccaccctggccaacatgatggaactctgtctctactaaaagtacaaaaattaggtgggcgtggttgtgctcacctgtggtccaagctactcaggaggctgaggtaggaggattgcttgaacccaggaggcagaggttgcaatgagctgagatcatgccactacgctccagcctgtgtgacagagcaagactctgtttcaaaaagaaaaagaacaattatcaaatcaattgcaatataaaaacatgcttggaaaatgtcaaactaacaaatgaaaattgttaaatacaaaggtatgtgttgtgttatagcaacagctatgtaatcaatgaatataattcagaaagattagccaaggatacaccagaagtgatggcagttgctttgttagaaatatagcagtataggagtataggtaatttaaaagtatttctatttcccaaatataccctactatgattatatttaataagtttaaaatactacataaggccttcagagaaggaaattaaatatcttttcctatttatttttccagtgagcaataaacttaactttcagtgaagtcttccttaaacacaacttgcatttctcccgctttggcttaagtatattttatcttgctctgttgtaaggataaacatttccatcctctctatttgttattttggctaaggacaccacatttccatgttagaatttcttcagtttttttctattgccttgagattgcatgcaggtatgttgagaactgaggattttaattataaatatacatagatttaacctaataaaggactttctttttggaggcatgtttgacaattggctggttaatgtacaattggctggttaataatgcaatctgatggtgtacttataactctaaaattctatggtagtttctaggctgttcttgaaaggcttatcattttaagtaagaaatcacacaaataggccaggtgcagtggctcacacctgtaatctcagcacttcgggaggccaagatggaaagatcacttgaggccagaagttcaagaccagcctgggcaacatagtgagatctcatcgctacaaaaattaagcaaagttagctgggtgtggagggacacacccgtggtcccagctactcaggaggctgaggtgggaggatcatttgagccctggagttcaaggctgaagtgagctcagattgcaccactgcactctagcctgggcatcagagtgagatcctgtttcaaaaaaaagaagaaagaaagaaagaagaagaaaaaagaagaaatcatgaccgggcacagtggctgacgcctgtaatcccagcactttgggaggctgaggcgggcagatcacctgaggtcaggagtttgagactagcctggccaacatggtgaaaccctgtctctactaaaaatacaaaaattagccaggcgtggtggtgtgcacctgtagtcccagctacttgggaggctgaggcaggagaatcacttgaacccaggaagtgaaggttgcagtgggccgagatcataccactgcagcccagcccaggcagcagagcaaaactccgtctaaaaaaaaaaaaatcacacagatatatcatttaagattaaggcagggatgtgggctttcttgtacgtgagagctcttctcaccctcaaactaagtaaattggtattattcagctttcctcatgtgattaaaaaaaaatcaaactttatggttgtacactgaaacttctccaggttccctcttttcttttgagttgtggaaacttgaactgtatttatgcaaaaataaaatatccaagatcgtattcttttggggccaattctgatggtggtatttgctattgctgtctttggatatctctttagttctgcagaaaacttacctactaataatggttaataatgtgtgcctcagcagcaacagatgcaataagattatagttaagaacctgggttcaagtactagctctttcatttactagttgtgttcccattgttgaacaaataaataaaacaataaacttatatttcctattacttgttaataaaagtgaatcagaaagcctaatgagaataaatgttttaaaagatgatgagggagctttaaaaaaataaattttgctgcactctaagatgtaaaatatatgtaattatatgtgcatgttagtgtgcggatatccaggacattgacactaaggtgatggttatgcaattgattgacactgaaatatgttggttcagtgccactaaggagccagcctcagatcttaaacatctcaacaattactatgagtccatgggggccatacaagttgtaggctccttatcacatttgtcttaaatagtattttttaaattacaagaacccttagcccagataatccatgttgtcatacagtgaatagatatcagatgtgttgacatgttggttctctcagcccacagggcagccaggcagggcctggggatgtgctcgatcccctgggaagacctccttcagttgagagctaccttatctgtttatgctgatgtgctgaacaaatataatcattttctatgtgtgcatgtgatagactctggtctcactgcagatcacgtctacattcaagtaatatacttcgatttgtcttgacttttcacactagttctcattctagctcttcctattttgtttaaattatttatgcttttctcacagccagtgctgctttttcaaatgtgggatgtccaaggactggagcatctgttagtgagcagcaaggttcctggcaatgtctgtatgtgcttggaggcatcattaaaatgtccccggaactgtgacttagagctggataagacaagagggatatgtggaatctaaccaggtctcagttaggagacatgaaaagaatttcagaaaaaaaaaattaatcttaaattattttaatataatcaaataataaaacaatctagaatgagttgccgaattaatccagccttgacacttacgtaacatgttacttggttacatggagggcgtgggcttggaaacttccacatgcccgtcatggctgagagggaaattgtcttagatgcctcagcttaagctccttaccaaaatctctggtatgatagtgggaagactgaattgtttttttcttgaaagtgaattagtcctaaaaagagctagaatttagtacaggaatgcttttttaaaagcaaaaaattagttctaatatttcaggtttatgtttgtggataaactgtgactaatgtggtagctttaagtaatgtaatgtttaagaaattctgaatatattaattattcaatagattagccaaatggccctgaatttaaaatttgaaacatcaccattgatccagacttctcttaggttgaaagccttaagacaattttatgtaatttataagggttcagcataaatacaagattattaggtttattatgcttatttaaataaccaggaaggtttctttgtaagtcagaaaactaaagaacttaaaaaatttgaaaataataaatgtataagttacttaaaatatttaacaaagtttgcaaatcggactaagcaataatcaaaggtcaccttaaaaatgaattttataatattaccttatttataaattgaatttttaaatatataaaataaacttaaatgtaaggggaaactgggcttttgcatttgttacttaaatcaatcaaatgttaattttaaaaaccaaagtgagccctgaataatttggaagagggtttagagatgccaaaaattcctgttgatcaaaagatatcacatcgaaagggtgattaaaacatttattccgaaaggaaaatgtgtggtatccattttgttaaaaatgataaattataatgttttatacaaaataaatgaatcttatcattgcctccttatgacgaaattagtgtttttgtcattaaaaatgaatttgttaggtttgcagtctcattgatctctcaggatttagaaataattattttttgctgaattaaagatagctctattttttaattgttattagcttcaaaaagagtagcaaattcacaggagggaaagtttaagctcatttcggataaaaattgggatcttaagtttaagcatgaaggacatccactctcccttgcttatttcagtctctctctcagacacatttagaagcagaagagttatgtatagttaagttcagcctcccctgttttcagtgagaaaaccaaggctaagaaatgttacataatttaagtaaaaatatgtggtgagaggtacaatatggtgtggttgatagttgacaggatttggtgtcataaaccctgttgggttttttgtttgtttaagatttttgttgttgttgttgttgttgttgttgttgttgttgttgctgggcgcagtggctcacacctgtaatcctagaacttcgggaggccaaggtgggcagatcacctgatgtcaggagttcaagaccagcctgaccaacatggtgaaaccccgtctctactaaaaatacatacattagctgggcatggtggcgtgcaactgtagtcccagctacttgggaggctgagccacgagaatcgcttgaacccaggagaattccttgaacccaggaggcggaggttgtggtgagccgagattgtgccactgcactccagcctgggcaacagaatgagactctggctcaaaaattaccatatgtttgtttcctaataataaacatttattgaattctttaaatatttcaatatgctttatatgtatttatttcccttaaacaccagagcaacctagtgaactaagtgatatccccattttatagatgggaaaactgagactcaaagcgattaagataatgagaggatcacgtgagcccaggagtttgaggctgcagggagttgtgacagtgccactgtactccagcctaggtgagagtgagacccttctaaaaaaaatttttttttttaatattcagaagatctgattttaaaacttgccttcattacgtgtttgttgccttgtgactctgggatgtcttcctaccaagaccttaccctaggttagctcagcaggtttttgtgacgagcaaacataaacaagtataggaaaacactgtctaaaagtaatatattattcattcacaatggggtgaagcctagaacccatttattctgactcaatttaatgttattttgctgactaattcttaatcaagtgttctttaccttcaaataattttattttccatctgtgcccgcttttgcctatagtgatgaatatttattgagtatgcatcttgttcttggcaccacgtaagtatcacacacgtcaaggtatatgaaaacttggcttatgttatcaagagacttcatgggatgatgagaaatgcagaaaaaaactgaaatcctgatcttctcttttttccatcacttctctgcacctcatattttccatctataaaataagtgataataccaccacatgaaaaatcatagaaagaatttagcaacgtaactagtaaaagtgaatacatacaaaccatatgtgatagaatggatgaatcctactaagaacagttaccaggtaactgaagctaaacaactctcagaggactgagggatgttacatttctgaccaagtagagtagaaacaccttgctaaatacttatgtattcactaaaggccccagaaaagctgcacctttggagcaaagctaaaatagggtactccacaccgaccctaacaaagattaacaacaacctttaagccggtcatggtgatgcatgtctgtagtcccagctactcaggaggctgaagcaggaggactacttgagcccaagagttgagcccagccttggcaatatagcagatccagttttttataaaacaaacaaacaaacaaatcatttgaaagaatcagtaagcctgctagaaaaaaactcaaaataatattgttatgtttaaaggaagattacaaagtctagacactaaatgatacaaccttcaccatgtccatcatctaatccaagattctaacgcagagaagcaagaaaatgtgacccaaaaacaaaaccagccttttggccagaaccgtcatcttccagtaatttgccaaaatgatgaatacaaaggcaaaaaggaaaggcactggatatatgttctctaggcctttacaaaaacatggagttgttcctttggccacatatatgctaatctataagaaaggtgatattgcagacatcaagggaaggggtactgttcaaaaaggaatgccccacaggtgttaccatggcaaaactggaagagtctacaattttacccagcatgcttttggcattgttttaaacaaacaagttaagggcaagattcttgccaagagaattaatgtgcatattgagcacattaaacactctaagagccgaggtagcttcctgaaatgcgtgaaggaaaatgatcagaaaaagaaggaagccaaagagaaaagtacctgggttcaactgaagcaccagcctgctccacccagagaagcacactgtgtgagaaccaacgggaaagagcttgagctgctggaatctattccctatgaattcatgcataataggtgttaaagaaataaaataaaagacctctggactatttaaaaaaaaaaaaaaaaaaaggccaggcgcggtggctcgcgcctgtaatcccagcactttgggaggccagggcgggcagatcacaatgtcaggagatcaagaccatcctggctaacacagtgaaaccccatctctactaaaaatacaaaaaattagccaggcgtggtggcaggtgcctgtagtctcagctacttgggaggctgaggcaggagaatggcgtgaacccgggaggcggagcttgcagtgagccaagatagcgccactgcactccagcttgggtgacagagcgagacaccgtctcaaaacaaacaaacaaacaacaacaaaaaaaattaaaccatgtaaccaatagagatgtgtgtgtgtgtgtgtgtgtgtgtgtgtgtgtgtgtggtgttgtgtgtggttaggcaagcaaaaacaacaaaaagcaagcaaacaataaatctaacatttaggatcaaaatattatttgagggagatgcaatgggatgagacaagaaaggcacatgtagataaatataggttacttattctgattgttgggttggatgtttattatattattgaatggtattgtgaatggatcaaggatgatggcatataaacacccaaagtttatggttaacacaattctgtgcatctgaagtgcaggagaacaaggtgggaagtaaaaaagaagagtagaaaagaacacagcattatgaagtctgtggcagaaaacaatataactttctagagcataaaaaaaaggccaatgtgagcacggctggaactggaggacgttatgttaagtgaaataagccaggaacagaaagttaaacaccacatgttctcacacatatgtggaagctaaaaaaaaaaaaaatgttgagctcatagaagtaaaaagtaggacagaggataccagaggctggggagggtcatgggaagggtgggtcgggggcaggatagggagagatttgttaaaggacaaaattacaggtagataggaggaataagttctattgttctataccactgtaggtaatacatagtttcgaatagctagaggaggaggaggatacagaatgttcccaacccaagaaatgaccattgtttcagatgatggatatgctaattaccctgatctaatcaccatacattatgtttcaaaacaatactatatacccccatgaatatgtacaattattatttgtcagtttaaaggtttttaaaagattaaaattaaaaaaaaaaagaaaaaaacccggccgggcgccgtggctcacgcctgtaatcccaacactttgggaggccgaggcgggcggatcatgaggtcccgagatccagaccatcctggctactttcgtgtctactaaaaatacaaacagggcctgtagtcccagctacttgggaggctgaggcaggagaatggcatgaacgcaggaggtggagcttgcagtgagctgagatcgggccactgcactccagcctgggcgagaaaaaaaaaaaaaaaagaaaggaaagaagaaagaaagaaagaaagagagagagagagagagagagagagagagagagaaagaaagaaagaaagaaagaaagaaagaaagaaagaaagaaagaaagaaagaaagaaagaaaaaaggccgcccggtgcggtggctcatgcctgtaatccgagcactttggaagaccgaggcgggcggatcacgaggtcaggaattcaagaccagcctgatcaacacagtgaaaccccatctctactaaaaacacacaaaaaattagccaggtgtggtggctggtgcctgtggtcccagctacttgagaggctgaggcaggagaattgcttgaacccaagaggcggagattgcagtgaaccaagatagtgccaccccactccagcctgagcaacacagtgagactctgtctcagaaaaaaaagaaaaaaaaacattttctgtgtgcctgacacatagaaaatcagcaagatgtatctctcagggcagactctcactgactcatcccatagaggctgtcattcaagcatttattaaatcatgatgtgaaatgcaacagtcataaattctggaatgtttaacccatttagcacgggggagggtagaaaagtcacatagtagcactcaataaatgttagttcacatcccctttataactgtaaagttctgcaaaggcaatactagtgtttattttcgtatggagaaataaaatagaacaagcatgatatcatgaaaacaacacttaaaatgagagttctagctttgccaataactagctgtatgatattaggaaaattattctcactggactccatctgtagtaactggagtttggtatattggaaatttccaagtgagttccacaaaacactaatgtcttttaggatgttaataggagctaaatgagaaagaatctgtgatcaagtcctatttgtaagtggactgaatgtttgtgtcccccccagattcatattttgaagtcttcacctcctgtatggctgtatttggagatggggcctctaaggaagtatttaaggttgaattaggtcataagggtgcagaactgatccaattggattagtgtcattaatagaagagacataagaagagcacctctcactctctccaatatcatcctccaagaaaagaccctgtgaagacaaaacaagaaggcaggtatgtgtaagccaggaagagagccttcactggaaacctaacaagtcagcaccttgatcttgaacttccagcctccagactgtaagaaaattaatttttcttgtttaagaccctagcccatgatatttttttatggcagcccaagctgccaaatacggttttatgtataacccttctcaaagatttctaatactcggagaagttctttttttttttttttttttttttttttttgagacggagtctcactgtcgcccaggctggagtgcagtggcgcaatctcggctcactgcaagctccgcctcccaggttcacgccattctcctgcctcaatactctaagaagttctacagtgaaaaaaaaaaaaaaaagaaagaaagaaaacaagggaaatttatctaatgtactgcttctgaaacttatttgtctattaaacacttttttaaaatcaccatcttttgaaacagggcttgggaaacactagccaggatttttcagttctgtcagttctgaaactaggattccttctaaaacctatacgatgtaactgataaagttagatttaaacatgagtgagactccacttataaactaggttataacaaggaaattcaaaggagattgtaaatgcagaggcagcacagtgaatgaagtaaacacttgaaaaacagcatcatatgtcatgcgtggtggctcatgcctgtaatcccaacattttgggaggctgagttgggcggatcacctgaggtcaggagttcgagaccagcctgcccaacatggtgaaaccccgtctctattaaaaatacaaaacttagccaggtgtggtggcagacacctgtaattccagctactcgggaggctgagacagaagaattgcttgaacccaggaggtggaggttgcaatgagccgagatcgcaccacttcactccagcctgggaaacagagctccatctcaagaaaaaaagaaggaaggaaggaaggaaggaaggaaggaaggaaggagagagagagagagagagagagagagagagagagaaagaaagaaagaaagaaagaaagaaagaaagaaagaaagaaaagaaagaaaggaaagaaagaaagaaagaaagaaagaaagaaagaaagaaagaaagaaagaaagaaagaaagaaagaaagaccatcactgctttgtgtggagacagcttctgtgttctttcaggacaacttgagaagttttaccaacaaaaactctcctgggatctccatttgttcattccataaatattgagtgcttacggtgtgtcagggactgttctaaacactagcatgatagatggcatcatgagacaccaacgtgtgtcagaagagagctctcattgcaaacactaatttgtacagatttttaattgcagcatgagcaaaagtagctagcaactctgctagttaccagcagatggcagtagcagtcacttctttactggcattttagattgggaatgtgtagaagcaccacaacctatcatcagaactactctgtggtgtcaatgtgtgacttagggacagttatctaacccgtctggagtgaagcttccctatttaaatactagagataataaaagcacctacctcttaagttgtctcgagagttacatgagataaaacacttgaagtgctttatcttcaacatgaaggaagggttaataaatgctagttattacttagtatggttgatactgtttttttgccatttgacaaaatgtcaattatccaaaagaggaagagaagcagatggctaaaagttgtattgcttcatagagcaataacaatatcagcaataaaggaaaagaaaatctaaatatctaaaaatataacaaagggtgcaatacaatcttaaggtaatcgctagaaagaaagcaaaaatctgagcaggtttttaaattagtacttttccaacaggtcacttttaaagtattttgactgtctgataactccctacctgcgctgactcaacataattgtgaattatttgtaaatttcctattcatcaaagatgcagcagatttgcgaacagagtttctagctagatagccaagggaatcatggggctattagacagctaactttttttcttaagcttattgtttattggaaccaaagataagttgtttcaaggctaggacctccggaatgactcagttaaaatgagccagaattcagaatttagaagcctcagagccagcttacctcacttcttaaaaatatttggaggaaaacactagggaactgagttgtaatggggaggtgggtaagaggagtaaaaccctcttatatacccttgagagctgtttgaacagcaaagattcccaaaacagggacaaactatttctagggataatctatatatgcaaatataactgtttattgaatgaattcgtccatatgggaacgattatgatgcttcaggacatggatgatttcactacaatctcaagagttcagttaaagaggaaaactttccatctgcaatccaaaacatcccacacttttctctagtaacaaatagggaggtctcaaaagacaagttatcctttttaggagatctccacagcctgaactaatgagcaactgaacaataataatctcatttttatgacaattcatgtgacgacattgaacaatgggaaaataggagataagcaatgctgatgaaatgtgtcagtggcttagcatcattgatggctattattatttttacttcttatgtggccagattttttaaacagaaaatttggaaagatttctcagactgctattttctctttttaggttgacttatttattgcccccacttcagaaattactttttgaaattgccccagatatcaggttccagaggacagaagcaaacaacaaaggttaatcctgagtatacagatattaataaaaatagaaaagaaatgtgaaaaataagtacattcactaataaaagtagtttagtattctttttgtgattgatcaatatgctaaaaatacaacacacacacacatacacaacaaagttagtaaaactaaacaaaaacacgtatcgcccatcattcagcattcacaatacaatgatttgctgaaatttctcttaattttttctatgttttatgccaactttattgtggtagcagattgtggtatattccctcccctagagcatggaagggacctgtaaatatgatgggatctttcattattaggttgtgttatatgtagtacagatgactttaagaaagagggactagggtgaggaggaaagggagggagagaattaacctaatgcatgcagggcttaaagcctagatgacaagttgatgggtacagaaaacaaccatggcacttgtatacctatgtaacaaatctgcacgttctgcacatgtatcccagtacttaaagttaaataaataaataaataaataaataaataaagagagagagagagagagagagagagagagagactagccaggtgcagtgagtggctcacgcctgcaatcccgcactctgggaagccaaggcaggcagattgcttgagtccaggagtttgagaccagcctgagcaatgtagtgaaaccctgtctctactaaaaatacaaaaatgttagccacgcatggtggtgtgcacctgtaatcccagctactcaggaggctgagacaggagaatcacttgagcctgggaggttgaggctgcagtgagccaatattgtgccaccgcactccagcctgggcaaccacagtgagaccctgtctcaaaaaaaaaaaaaaaaaaaaaaagagagagagagagaaagagagactatacttggtggtcctgacctgtccaggtgagtccttaaaaaggacaagtctctttctggtgaaagaggttagaagcatgagaggagtttgatgcaagagagattctagctttgctcactttgaaaatggaaaggggccacatgccaaggaaagtaagctggccctcggagctgagaatgggccctgagtgacagccagcaaggaaacagagatttcagttccataatcacaaggaactaaattctgtcaacatcctgaatgaggtacaaagcagattcttcccaataacctacagaaataaacatttctagtaatatatatatcattctgagagttattttatcttttctgatttccaaaaatagaatccccatggaatctgaggttagacaactgtatgcctcctgttaccacaagtacacactcttttgtgtctagatttctttttcttagcataatgtttttgagattcatccatattgccatatataatattagttcatttcgttttattgctgagtgtttctctctctttattttattttatttatttttttgagacaagatctcactctgtcacccaggcaggagtacagtggtgggatcatggctcactgtagtctcgaccttctggactcaggtgagtcttccatcttagcttcccaggtagctaggactacaggcacacaccaccatgcccagcaaatttttttttttttttttttgagacggagtcttgctctgtagcccaggctggagtgcagtggtgccatcttggctcactgcaagctctgcctcccaggttcacaccattctcctgcctcagcctcccgagtagctgggactacaggtacccaccaccacacctggctaattttttgtatttttagtagagacggggtttcaccgtgttagccaggatggtctccatctcctgacctcgtgatccgccctcctcggcctcccaaagttccgggattacaggcgtgagccaccatgcctggcctgcttaggattttctatgtatacagtcatgccatcttcaaataagacaggcttttcttcctttctgcccattatgtctttcatttcttattcttgccttattagtattgctaagacttctagcataatattgagtataaataggaagagtagatactcttgtcttggttctgatttaaggagggaagcataagggggactaaatgcttccaccagtaaatataacattacttataggttttccatagattcaatttattaatttgaggaaattctcctctatcctagttaatgagagtttttattttgaatggatgttgaattttgccttatggttgtttgtgtgtgtaaagagataattgatgtgactgtttttccttttctttatgggatggtttttattttgaaattcaaatgtctttcgtagatttagggcttttcagattttttctatttcttcttgagtcacttttgacatttttatctttcaagggatgtgtaggtttcatttaacctgtaaaatttattggcataatgttcttcataatatctccaatattatcccttttaatatttgtaatcatgtccccctctcattcctaatattggtcatttgtgtcttctatctttttgtcttgatcagtccaccaagtgttgcataaaatttaataaatttttttgcaaagacccagattaagttttactaattttaaaaagttatgggtccaatttcaatttcattgatttctgctatgacctgtattattttctttcttctatttactttggattttattttctcttcttttcccagcttctcaaagtctccaccagatgcccaaaatgagaacagatgacttcccacttggactggtcagaactcaaatatctctctgccctgtgtgagctctagaagtagttcaccttacaattctccagtggtttttgcctgcccttgtggagtttcaccttattcctgtctggccacatacacagcaaagactcaaagagacccctatgcagatttttggagctcttttcagcacagctccctcatctctagaactctacctcgtaacattcagcccccttggcctctctgatccctacatctgcttgactcaatagactctgtttaggatccccctctttgcatctacagtctggttatttccaggaagatatcaggggcaatcatagtgatcaccttgtttgtttcaacttcttttagtgattaaatcttgtcctacctgatgtccaatgtttgaaaaataaaagctttttacgttctgcatatttttctgggtttttgtgggagagaatgtccaatccttgctattccattgcagccagaggcagaatttctctcactacagatttttgaagttttcttttacttccatgctcttctatgtcccttgttggggtttgtttgttttggtctctggctttcatggtagaggctttcctcaaatgtcagtgtgcctttgatgtctgtatttacagtgaggcataacaaagctgatctgaagctttacatgaatgggcaggctttgtcaaatggtgggtctcaattgagggggacaggtggggacttgacctattcactggccagtccctgtaggtcagtatctcataggtttttcatttaaagatgattaataacataggagaggaattctccaattctctgactggaattataagccttgctgctagacttctgataactaaacagagaatgaatttttgaggggcttatatttaggaatatttccctttccatatggtatggcttctcactttcaccctctgctgttccaagactaggtcttttttggtttaacctctccaaagagttaacttcccatctgaggcagctgtgcagggggtgcatagactggctgtgtgaggtaggggagggaatctatggagtgtctagagcttttaaaatctgtaccaatcctccttcattctgtacttccgcatttagagataacttatgtatctagttcctgagatttttcttggattctgctatagaaattaacttgctttttattcactctctccccggagggttagagtttatctttcactagtctgctaagtcagctaccatgcatctattagctttctcagatccaaaatgttgaattttcttgtttgttactatctcctattttctttgtccttgtggctttatgcttttttttttttttttttttttgagatggagtctccctctgtcacccaggctggagtgcagtggcatgatctcagctcactgaaatctctgtctcccgggttcaagcaattctctgcctcagcctccagagtagctgggattacaggtgcccaccaccatgcccagctaattttttttttttgtatttttagtagagagggggtttcaccatcttggccaggcaggtcttgaactcctgaccttgtgatccacctgcctctgcctcccaaagtgctgggattacaggcataagccactgcacccagctgctctatgcatttttatataaattattaggcttcttttttttgaaaagttaaaaactctttaattctttattcctggtaccactatcacaatttacagggccatacacctgatgtaacgaaaagaaaaaaaaaagttacaacagataaaagacttcaggaatgtacatctaattgacactacattgcattaatcaatagctgtattttttgcaaactgtggttatgacagtcctgaacaagaagggtttcctatttaagctgcagtaacttttctaactatggataattgttccttttatggcagatttttccagttcctctaatgcatttgagacgactgtctcaaagtaacctgctgctttcctggtaactcctcactttaactcctgctaggaactgaagcccttttttgctgctttttagaaccttctgttattatatccaccacttttaccaccagatccataatcaccaccatagggactgcccgagcttcttccacccagaaagcctcctttcatgggtccataatttgattgctgttgtccactataatttccaaaatcactatacttcccaccaccatcatagttaccactgtcaaaatttcctccttcattgcaaccatcacatcctccaccattgccaccatatccaccaccttggttttcatgtcctggtccaccaccaccatagccccttattttactataaccaagaccaccaccatagttgccaccatcacttccaaatccattatattcaccatcacctcctctgcaactatctctgcttccagcacctccatcatagcctcctcttccaccaaagttttcaccacagccaaaattacctccaccgcctccaaattttgctctgtgacaattacaactttatcaactgtattatgatcctaaaaagttatggcaaagccaggtgcagtggctcatgcctcccaagcactttaggggccaaggtgggaggatcgcttgatccagggagtttgagaccagcctgagccacataaggagaccccatctctacaaaaaatttaaaaatcagctgggtgtaatggcacatgtctttgctcccagctacttgggaggctgaggtgggatgattgcttgagcccatgaggttgagtgagctatgatcaggccactgcactccagcctgggtgataaagtgagatcctgtctcgaaataaaaaataaataaaagtaaattttaaaaaagcaaatcccctcttttttccactctgcctgccttccataacatctatggtttaaatagtgccatacttttctttcctctctctctctctttccttcttttctttttttgagacagggtctctctctgtcacccaggctggaatgtagtcgtgcaatcttggctcactgcaccctctacctcccaggctcaagtaatcctcccatctcagcctcccaagtagctgggaccacaggcacgtgccactatgcgcggctaatttttgcatttttttgtagagacggggtttcactatgttgcccagtctggtctgtcccaaactcctgggctcaagcaatccacccacttcggcctcccaaagcatttggaattacaaacgtgagccactgcacctggccttgccatgctcttcaaattacattcttctctatcttccttgatatcacaaacaaagattttcttcatggttagatgggcaccaggccttatagaatcctctctagaaacagctctctttggttccagtacacacctgtcagccttgtgtgtccacctctttaacacgagagtaagtcacaaaaccaaagcctctggaatgtgttgtttgggagtctctcattatcacacagcctgtgagtatgtgccatttctcaaactatcgtctgtattttcaaagctgtgaacacagtaaacagttttctcaagtgctctggttcctttggatcatgtgcctccattttgagcccggactcgccttttccaaattgagttcaatttgggactgagaggaagagcagtcttcttttttaagaatagttttaggtctacagaaaaatcgagcagaaagcacagagagtttccatatgcttcctaccccagcggtgtcccctatcattgttttgcatcagtgtggtacatttgttgcaagtaatgggctagtaataatattgatacaacattattaaagtctataatctacattagagacttgatgctgttttattcttctcctctcattggaaagtggcagaaataaatgtaagtattaaatcttcgagggttaacagaaagtcttctatgtaggcctttggctacttctctcctttttgtcaccctcaaaattctagagtcatatgtattccctttttcccttcatcttttccatctcttcattatgcttcaacccattgtactttatcttctctgtcattttactaaaatatatctttccacagaaaacaatacctcctttattactaagttcaagtatgcattattattccttatcaaatttaactttgtagcagcacaggacactgttaaccctttctcccttcttgaattattttttacttaacttcccaacttggtatcttaccttcctgattcccagctactctaatcattgatcctttactttctctacattagccccattctctctctctctctctctctctctctctctgctttagccagtctctaagatggtcctcaatgattcccaactcttggtattcacattcttgtgtgtcaccttcctccattgacctgggttgatccatgtgaccagtaaaatagaacagaagtgatggtatgtcatttccaagattaagttataaaagatgttgcattttttttttgtcttggtcttgctctctttctcctctagactgctccatgagggctgcatgaagcagccacataatttaccattacaacctctggcaaatagtaagtgctcaactcatatttgctgagtcaatttatataagaacctttccacattttattgcttcctctctccccctcctacgaatttctatagcacttactgaacgcattttgacatctagcacattttgtatttattattttataaaagggcttggctcagttgagccttctgaaggaatgttccctcacctactatgtggctggcactgggctagttgcaggtcaatcgaagctcatcttgatcatcctcctagagaaggagctccttgtaggtgagtggggccaagccctggtcacctgtatgcttcccagggaacctagcctaggagcctgtagagtagcataaaaacgatattaaaatgggttgggtgtcgtggctcacacctgtaatcccagcactttgggaggccgaggctggcggatcacttgaggtcaggagtttgagaccagcctggccaacatggtgaaactccatctctactaaaaatacaaaaattagccccatgtggtggcacacacctatagtcccagctactctccttgggaggctgaggcaagagaatcacttgaacccaggaggcggaggttggagtgagccaagatcgcgcgccactgcactccagcctgggtgaccaagcaagaccctgtctcaaaacaacaacaacaacaacaactatagtaaaatgaacatttacctggaaatctcaaattctgagttcaatctttgacccttaaggctgtgactctgggcaagtcactccacaaatgtgaacttatttcctcattgtgataaagatatagtaattatactttttacccaaggagtcactgggtagctcagatatgtcaaacccttatttcctcacttgtcataggtcacttattgtcagatgaatcatggatttcataatatattttgcatttgtgttgggaatggggtgtgaagagcatgattttaaccatctatatcaattataaaacattcagatttcagtaactttaacataagaaaatgtttctttgaatcaagacaacacgttatctattgaagtgttcaagtgttctgaagttggaaaaccattgtaaaactgggagctctaattatgtcacattcaaacagatgtgttctgaattaatgactgagttgattttcctcttttttgttcagtcatgtgttaaggattcgttctgttttattattgttatgaaacattgcaaacacatacaaaagtgaaagcaatgccttcccatggatctgatatccagctgcaacaaaaatcaacacaaggtcactctgatttcatctatatctctactcaatactctccaccccccaccatccctatgggctattttcaagcaaatctcaggtctcatataatttcatttgtaaatactttaaaggagtattgtttaatagccatttaccttccaccgtcttctagtcagagataaactaagttttcttagaggtgtttgcaagcttagttcacattgcctaccctcctgaaagatctttattaaccaagttgaaaaatacaccttcttaagaaggccccttccccaatggttactgggggtggaaggtaatcttaaaatcattacttggggagtaaaatgctggtggttcccacatttctgaatacctttccattttaaaaccagttcttaatgcagtagacgagatcagaaactgacctacgtaagtttgtgatttttttttttgttagagtgctgatttcttcttaacttttttgtttgctttatctccatgggtttaatcattacatgatatggttctaatgatagcatgttgtgtcattttagggacactattttctgcaaacttttttactcagagtgttttctgaccataatgcattacaaaatgtactatatagatgtgaatatatgcttagaattaaaaataaaaatccatggataagttttcaaaataatgttgccactcactgtatgtttcaaaagagatggggtttcactatgttgctcagtctggtctgtcccaaactcctgggctcaagcaatccacccacttcggcatcccaaagcatttggaattacaaatgtgagccactgcacctggccttgccatgcttttcaaattacactcttctccatcttccttttcaaaataatgttgccactcactatatgttaaatgttaaacattttacagattcaaatgcagtagggattctctgaaaaagttttatcttactaacagctttcagattatcagtactagttgtatggcttaaacacagccacatgtaaatacttacttagatgaagctatggctaatcacatatgtaacacaatcagtttcatgtagtggtttgatcactcgtgtattcaagactatataaacagggatgaatttgaggaagttggagtgatggagtgagaaaagtttgtttttgcagcagtagcagtagaaggggcaggccgattcagtaaacaagcacacatttcagaatgcaaactgcattctccaagctggcaccatggttttacggtgctagggatgtttactgcttgttgggtttgcagctttataaacagtgctccttggagttctctgcttgctattctgaaacatatttgagttttgcaaccgagaagtaaatgactttgatttccaaaatcagtcagtcatttttcagtgttgtgataggagattcatttgaattcacttcttcagagatgcaggagccaatcaggatcctgttgcagtgaaaatgattcttttattgaaaccccagcttcctttaaaagaagccaaagagtactgaattacagaactgccatacagccttccctttattctttccatcacccaggccacaggaaaaaaaaaaaaaagacaaacttttgttcttattttcacaagttatcacatggtttggaaacttcagggcatttctgaaacttcattggtatgtgccagaaaagtcctctttaacacaccaggttgaatgaaagacagtttgagatgttaatttccatttactgcagaaaaaatatatttaatgcattaaggaaatgtctagcttaaagaaattgcccacttttgaaacaaatggttggaggcctgaggtccaaagctctaaaatcagttaacaaatgtttattgaacacctattttgaactaggctgttgaagaagttcaaaagtctaagataaattcccactttcaactcacctacagtctagttgggcagaaaaaatccaaactcaggggacaatgcaagagttagatagtaaaaccagacaaatacacaagcaatgaaacacgacaccatatggttgggtttagaaaagtgtttcaggcaatacatattgtagaggcttagggatcacagtaatctgaaaatccctggaaaatattcacaaagaaggtagaccattgggatgggtttgaaaacatagataagaatcagataaccttaagaggaaggaggaagcaaacagtgagtctggttgtaatagagaagggagtgggagaggttaaggagggtgggaaggggccaggttggcaaatccttagtggtaaggcctggctgtggggctgaagatgattctaaggggtccaaggtcaacagcagtgtttaaaattagattgccaagtgcatggattccctttcctttcctccttttctgtcctttaaaagcagaacctgattagacagtctgggacattcccagccctaggctaaaaagcagcgattgaggcacaaagtattcttggccctgaagttgaacctctggggatggagctcagggaagtcatagggagtttgggcccaggtaggatcagacctatccgcaggcttacataggctccagtgattaaagctcagcttcctgaatatgccccgaggataaaagagacttttccgagtgaaaggcattttccaaggcgctctcaacgggaatgtctgagatagcgaactgcggctgcagagcaccagctgaacgcacacacacaagtgtcttctcacggtatgattagtgttcacaggtttcgtctagctcatcagaaatgaagaatagcgatgatgaagtgacatgtcaccgggagggttgaaaaagaaaaagtgcgtaagagggtcccaaaaagaaccagcttccgtgtagacgggtctgcagaatctgccgtctcccgtcttctgggtcccctggcccgcccggagtggggacaaggaaatggaaagcccggctcacccggctctcctccctcgcagccagcagatggctcccgggctctctcgcgagcccgctcgccccctctccagacgcagggcttttgcggtttgggagggaggctgcgaggaggggcgcggtgcccgccgccgccaccgcagcaccgcacagcgtctctcctgggggtgcgacctacgccggggacccagcgctcgggcaccggaggccggcctcgcaccggtgcggaggccggctctcgcgaggtgaggaggaaacgcaggaggaagaggagaaggagaaggaggagaaggaggagggccggagctgcccccgcccagccggagcccggcaggagcgcgaggaaaacctactccccccgccccgcgccgctctccccgccctctcccacgccttccgctttcacctagggctgtaggtgcggcgcggaggctgggcgggagctacgccggcccaagccccgccggggaccagcgagccgggaggaggagcaggcgccacagccgccccgcgccccgcgcccgcttgtaatccggtccgctccttattcagccgccgggaactgcgaggaggcgtcatgtagcagcagcagcaaatccgcctcgcatttgcaactcttttttttttttttggtggggcggggggcgcgcggcaaaattctgtctccgcccccccttttcttgcccacttccatttgcaagctgcatctgcctctctaaaaaaattgaggagttcggggaagggcagggggccataaatcagagttggacctgcaataacccccacacctacagggcaaccatgaccgaggagagctctgacgttcccagggagttgataggtaagattcacgcggttgttggttttccaccttcctctgcgtactcctcacctctctctcccttcccacctctgctttcccgcaggtctcgagaagtcttggcgccccttagggcagagtggtgttgggcagggtcactgggggtgccgggaagtttgttcccatccgaccgcctgtagagccaagtgcagagagggaaggcttcggggaggaatcgggagtcctcgggaggtgggtgggaggagggtctcgactgtgagccctgggcacctcctcttgcccggaagcggggatccaggttggcgaaagaagggggcgggccatcttagacttgggagttctgcaagcgaggggagccctttacagctcccagcccactgccccaaactcgggaaagtccgggaaagcctattggaaggacaggtggcgagcgcacagtaggtcgtctccggcacgtgtcaggcgctttcctgaaaatgccccgcgggaggtgatcttctgacacgcagacttgggggagtgggcgctagtctggtaaaatgactgggcttggcaaggtgtggcttggtgtagccagctgggagcgaaagggttacagggctgacgcagactcaggccaggaaatagagggttaatgataaaagccttattttaataatgattaacctaccgattctccctataggggatctcttagggaacccgtgtgtgttacgctgtgcaaggtgacccattgtttgagtaccttgaggtttttttttttttggtggtggtgggggcggggctggttaagtcttggggtttaacttaattatctggagggttaaaatggcagagctgaaataggatgggagagtgttctgaaaacctagcgtttaagcatgtatatgtgtgtagcatgttatactgtaacaaggtatgtgcgtctgtgtacagatgtgttttgagccctagtgacctatattccctcctgtaccattcttggcacactacacagcctacagctcacaaagatgatgtttaatcggcgctgacaacaagaggaagttctgagcacccgttgatctccatgtgtggaatttgcccctctgttgtttcttttagctaataatactttggaggaatttgtgtatgcccttccgttggtgactgttaactcagcaggtaaaacttgatgtagagaggctgttgctaggtttgtatggaagcccctacttctgctgaattacagacaaacctgatcttttaccagaatttacagtatgaaattattcacagacgcacgcgcgtgtgcgcgcgcgcacacacacacacacacacacacacacacacacgcacctctcatcatgatcccagcagatcctcttctctctccccaaccctgtggagtctgcatcttttgctggagtgagtgacacatccggttctgggaggctgcgacctttccaacaccccaagcaaacgccagaggctctgaagacgcctccagaggtcctgagaatgagtgtagggcagggcttgcctggctggtcaggggataaggatggctaaagtgggtggcagatttttactttatataaggagttgtccttaagtctggaaatggaaagtgtaggtaattacttaggcccaagagaaagagtgaagggtagagtggaaataaggtgtctgggtttctattcatggttctcaaaaggaatagtttgtatattttaaaagttgagtttgacctttatcttgaaatggaatttttgtttttattaagtattgcctatctctttcaagagagtgacatattatgcccgatatgatttttctgggcctttcagtggtcaagttaggctgggatagaataaatacctgcacctgctttcctctaaattcaagtgctcacaagagttctgctctgatcaattcaaaatggcgaccgaccacatgaaaacctctatatattcccttaagattccctcaagatatttaaaaagtgttacagacttggctgagcgtggtggctcacccctgtaatcctagcactttgggaggccgaggcaggtggatcacctgaggtcgggagttggagaccagcctgaccaacatgaagaaacccggtctctactaaaaatacaaaaattagctgggcgtgggggcacgtggctgtaatcccagctactcgggaggctgaggcaggagaatcacttgaacccgggaggcggaggttgccgtaagccgagatcaagccatttcattccagcctgggcaataagagtgaaactccatctcaaaaaaaaaaaaaaaaaaaaaaagtgttatagactttatgtagaaacaatttaaatgtagagaagaataagaagactatatgtcactcctgttaccacttagaggtagttattttaaagggtatatgattttccagtctgtttccatgtgtatatgttcttaagtcaatttcagatgcccatttcccgcaattcttttttaggggagggaggagtggcctgtgcttgtttctcgagttctgataagataggagctttgtgaagaactcatagtgcagtgagctcttctacatgttcccttgccccaaacattccacctccttgctgttccttgaacaggctgtgctttctcagatttccatgctgttctttatgcgtacactgtctttttctccccgttttcactctttatctcagcagctctaaactttcatggcggtatttccaagaagaaaattttgattaccccttattaaacatatatttgttaaactacatgctccatttagtgtgtataatctaaaacacaaactgaaacacacattgtaagtagaaatgaaaattctattttcttctttcatctcaatggattatattgtacactctactttggaaaccagtgatcttatttcctatgccttcaagattcagctcagggatcctctcctccctgaaacctttgcgtgcttccgaatccatgatcttatgcattgtgtgtgaatttcttttatgacatctctcagtgacctccactagattgcaaactcctgtgaaatgcaaagaccatctctatctagcacctagtagagtacctgacatacaagaggtactcctatgtacatttatttgttgaacatgtgaatagaccaaaatgattataatacagaatacagaggtatgggagcatagaggaggggactgtattttggaggataagtagaatataaccaggaggacaatagggaaagggcatcccaggaaagagaataatagatacacaatcctaggggtgtaaaagatgaagatattaggaataattggatgtttaggtatgtgctgagaagtcacactgaaaataaatgtgaaagaccttgaatggcatgccatgagttttgggtttattcaaaaatgactgcaactcgtagactgggagggacgtgatgaatctcacagttttggaagagtcactgtggttatggaggtgacagtgggctgatgggttagaggccatggacttagtcttggtgagagattctgaggcccttactgcagtcatgcctaggtagtcaggagccgtggaggaggtagattttaggagactgactttctgtctgagagaaaggagttggacataagcattttccagcaacattagtgtccagagtaggagataatgagtttgatttcagacgtattcattttgaggtactcatgggagccctaggaagacttttccaccaccatctgaaatgtgaagtctccagatttctccttctattgcctttgaccacttcttgggggtattgtgctgtcatgattttggaaggacagatggctgggagtgcctttgtttgagtaaatcatctggtatagttctggcttatttttatttttttgagacagagtctcactgtgtcactcaggctggaatgcagtggcacgatctcagctccactgcaacctccacctctcggtttcaagcaattctcgtgcttcagcccctggactaactgagattacaggcacgcaccaccacacctggctaatttttttttgtatttttagtagaggcagggtttatccatgttggccaggctggtcttgaactcctggcctcaagcgatccaccttcctcagcctcccaaagtgctgggattacagacgtgagccaacgtgcccagcccggttctgttctgttttgttttgccgtattccccaaacatcatgtcaagacttactcatagagaatgctaatatttgtatgacactatggtgaacccagaggctgctgggcaccagaggtaaccagccaggggcagagggaatttatgaattcctgttgtgttctgcatgcaacgtagtgtttcatcatactgcccaacttcactgtttgctgttctttgttttttcttttatatgtatcttattttccaaacaagattatgtcatgccttgcatgggctggtattatgtcgtgcttttgtgtttgcctcagcatatcaatatacagtacgaggtacaaagtaggtgtttattaaatacttgatgggtgataaccatccaacttgttaaaacaagtaaaaaaagacaaacggtcgggcacggtggctcatgcctgtaatcccggcactttgggaggccaaggcaggcggatcacttgaggtcaggagttcaagaccagcctgaccaacatggtaaaaccccatctctactaaatacaaaaaattagccggacctggtggtgtgcgcctgtagtctcagctgttcgggaagctgaggcaggagaatcacttgaacccaggaggcggaggttgcagtgagccaagatctcaccactgcactccagcctgggtgacagagtaagactctgtctcaaaagacaacaacagtaaaaacaaccaaatatactcctccaaatgcttactcctcctcagtgctttttttcttattaataacataattccttttttttttcagaaagcataaaggatgttattggcagaaagataaaaatttcagtgaagaagaaagtaaagttggaagttaagggagacaaagttgaaaacaaagtgctggtaagtattgctgtttatttttattaaatgtttggaaatgaaagtgtgttttcattgtttagattgcttaattttcatgcagcattacttctgtgttttatatattgttcaaaagttctgatgaccattttgtcttaggttaattggaatatttctttgtcaaaagttaaaaatagggtaatttgaattttaaagatcaaaggcttttagattgtatttctcaaagttgtaattgctgcctatatttaggtaatctcttagagcctgttttcataatattcagagtttgatgttaaatggaacttttttatttggtgtgtggtgggtgatcctatgactttattcataaagtcttatggaggagtttaaaaagttcatctcatgttggtttaattacttaattagattttctcagatgttatatatgagtccatctaaggggtgatgagctaacaaaacattgtcattttacttagggtgttggtgctttggagggaaactcctgctgaaggcagtatctgctagtgttgcgactggacttggggttccttctagtttgtgagaggagatgctgagggattgggccctgctgcagaaaacttcttagagaggtgtcagtgacagagttgtacctttagagaggtgaaaacattttgtgatattttaatggtttctaggttgagattgtggcaaatctaaatttaagcttaggtggaaagaatattttgatggagagaatactgtttaactttttatcatggatattttcaaacatatgcaaaaagcagataatagtatatcgaactctgtgtacctgtccttcccagcttcaaccattttcagcattgtactaatattaaatatcttccccatggtgtttgtttgttgttgctgttttttttttcctctggagaattttaaaacaaatcccaggtatgttattgaaagagtataatttcttaattttttaaagtctttttgagacaggatttcagtctgttgcccaggctggagtgcaatggtgtgatcttggctcattgtagcctcaacctcccaggctcaagcgatcctcccacctcagcctcctgagtagctgggactacaggtgtgagccatcatgcccagctaattttgtttattttttgtagagacagggtctccctgtattcccgaggctggtctcaaactcctggactcaagcgatctgcctgcctcggcctcccgaagtgctgggattacaggcatgagccactgtgcgtggcctgaaaaagaatatttttaatattccattgcttcagttaaagttgccaaagaatttgaagtgtctttctgatcacatctgtcttgagaatcttctaaaatatctaactccaggatatgtgattgtcttttcttgttagtaaggattatgcttgtgatggatgacttctgtttctatgttgtctatatatacaagtcgggatggtaaaggcattgaatgggaaaacttgaatggcttttgcccagcaacaaaatgtgcttatgtaaactgcatgattaagttatcagtagaagaaatgattggtgccattgttctgttgtatttaacttcagtaaaggtgagatttccttaagttatgtttttcttgatgttgttcaacaatgattgtgctattttttggaagtggtagtgtagagaagaaatattgtttctgtcatttgcttttttacaaatttaaagtaagtttttaataatgtagtaactttataagatgaatcaacttctctacaacttaaatataaggtagtggttgctatgacagtctaaaaaattggggcttggtattatttgatatggaaattattattatgctaagaacaaacccacatcatgagtgcaatttaccatgttaaaatttcaaagacaaatttaaatgtccagtataaaattagcactatttaaacatgcttatgattagtacttaattgtaagtttttttggcctcatctaacagctggaattgattaaagttgtaaccaaattaaaaatgtatttgagtttaagcatttatctccccaaatatggaatctaagcagtttctagaagcatggccggaactcattgtggctgttacttacttgcatgggcaggaattattaatagaaatactcaaggtctggctttctttgacaggcttcaagttagaacaagaagatgtatgaagtaacctcaaagttgtggatttctgagtttctgagtttagagaaatttaattgcttaatccattgttagcctactaaaatggttcataaatgagttggctgaatatctacagtacgctttttgagttgtgcttttgttacttcccccattgcccaccattcactccttttcttcttataaaagtaggagtgtgctgtattttacgtggttctttcttcttacacttgagactttatactatttctagcttatcttttgtagagggcttatcttcatcttcctataatcataatagctaatatttctaaaaatctgtttttgaagtctagtcaagtgaagcaatgggattggaggaagagcaaagaaatctataatgagttgtgatcaattagttgtaaacacccctacactcagaccagccatgatcataatagctaatatttattaaacactggccaagtgccagagactgtgctgagtacttaattacgcattgccttgttatatccccactacaacgctatgaggtaggcactttttacatctccattttacagatgaggaaattgagatttggcgaggccaaagtaaattgcttcacatcatttggctagttaataacagctgggattcgaacccagctctgcctcactcagagcctatctgctttgcctttgtggtcaaaaagaaggcagctgttactttgttccatggttgctgacttcaaacaatgataggggagatttggactttagagtctctctgtctttgattgattgatttatacactagttttatatttattgagaacctgctgtgtcccaggcacatggtgtatacaaaatagtcctagtctttgacttcatgggactcgaagcttacagtctagttggggaggtaaacatgtagccaggcagtggtttcagatgtgctatgagtggatgaatcggggcttcaggagcacggagaggaactcccaactcaggcctgagaatcagggaagacttcagaaggaagataagcttaagctggcgttcactggatgagtaggagttagccaagcgaagagagtggagacatgttctggacaaagggaacagaatacgtctggaagcctgagagagcttatgttagagaaacatactaaggtacagctggggtaaggcatatacagggtagagaatgggcaggtgtaaagcctgagtcctgtccttgcagttgggatgtcaggtgaaagttaggactggttaaacaggtctcttcttgccacctgtgtataatgaaatattaaggctcagtggttaagggcccagattttgggttcacactgttgctcagtaactttgtgacaatgttaagaatcaggttttttttttttttttttccgtatggaaaaaatcttatgttataacagtatctattggtatgtggttgctttgcatatcaagtggaatttatttaaatactgcatagcacagtggctgcatgcagcaaacacccaaaaaatgataaggcaagaggaacaaaggggtcctgcattctgttttctccgtggtgcggaaagtgccattccttctgaagcccaagtatctgctgcctccattgacaggttgaggtcagttcaccataaggccaagagggtttattcacagtttgtggcaccttattagcaggatagagggcaacaagctggatctaaaattcctaaggtatgctctcctcaagtgaaatcagaaatgctagatgttctggggcaggagtgttctattctcaaataaatttggcagagtgttaaagataaatcagtttctttactgcatgagttttcagagccattaatacagccctgtgcattgtaaatttctaagaattggataaagtatgctgttttttccaaacttatttagccagagaccctaatgaccatgggctaagaaggaacaggccagagatgatgcctcttgggacagttaagaaaagatagaacaggcttgaataggctctccatcattaggagtgttctcctgaggaatggtcctttagccatgttttttaaaatctacattgtgagtagttccactctgggctacgttggcttgacatgtcatatgttgttgaaatacctttctctgttgtctttaggggatgtcattagaaagtgattctatgtttatttgactctaattcccttctcccatttgctaaatgaatcttcacccaatttttatagtacttggagtgtaaaaaatgtattttaacttatgtattttttaaaattaaactttttcatttttaaataattgtagatttgtctgcagttatatcagataattcagagaggttatcttatgccctttatttagttttccctttttgcaaaattacagtataatgtcacaaccaggatactgacattgattgacactgtaaaatgcagatttccatcaccacaaggacccctaacattgcctttttatagccatacctagcattccccacttctctgatccctggtagccactaatctgttctccatttctataaatttgtcattttaagaacattatataaatgtactcatacagtatcccctttttgggattggttgttcttgctcagcataattccctggaccttcatccaagttgtatcaatttagctaaggagtacttcatggtatggatgtaccacgtttggtttagccattggctagttgatggacatctgagttgttttcagtttttgtctattaggaataaaactggtgtaaacatttgtgtacagatttttgagtgaacatacttttccttgctctgtgataaatgccaaggagtgcaattgctggtttgcatgggaattgcgtgtttacttttataagaaactggcaaactgtttcccagagtggctgtaccattatatggttttaccagcaatgtatgagtggtctagtttctctaaatccttggcagcatttgtcattgtctggacttcttttttttctgagacagggtctcactttatcacccaagctggagcacagtgacatgaacacagctccctgcagcctcaatctcccaggcttaagtgatcctcccacctcagcctcccaagtagctgggactacaggcgtgtgccaccacacccggctaatttttgtactttttgtagagatgggtttcaccacgttgtccagctgcttcttgaactcctgggttcaagcaagctttctgccttggcctcccaaagtgctgggattctttttttttttttttttttttttgagaactaagttgaaggaaaaacaatgtctggcaggagcaagagccctgatgacctcttgtttcccacagttctgctgttgcctgtttgggggagaggaatgtggcactcctctctccaggatggtggccttaaagtgtatgaaaagtcattcctagtctccactttggtttcttctgtttgatttggaatttgggttacatcatctttgccaaccccttcttcttccacaccctttgtaaaatgggtcagaagcaggacttcttttcttcttaaactgagcaagtaggggaagtggcatacaaatcgaactattctgttttgtttacctattctctttaaaactgcccatctgttgtccatttgttttcttttgaaaagttaatctgaaatccacccccccggcccctgaacgacagggtctcactgtgttgcacaagctggagtgcagtggcactatcacaatcacgagccttgctcaagtgattgcctcttgcaatcacttgaactgagccttgcccagttcagcctcttgagtagctgggactacaggcacatgccaccatgcctgcctaattaaatttttttattaattaattttttttagagacagtctcattattttgcccaggctggtcttgaacttctggactcaagcgattctcccacgtcggcctcccaaagtgctgggattataggcatgagccaatgcaccaggcctgaaatccctttaacatatttttttccccttggctatttatttatggcttttgaacatcttaattagactggattggagtaactataagttaacttaaaaaaatgtcgaaaggcataggggtattattttgggtaacgtatccctaaaatattttggtggcagtgctgtatttcattaacataaagtataaactctattccacctgctttttttttaagaggacatgaaaaaagaaatatctctcatatagaagttttggaagtatttgacccacttagtcacaaattatcttcaactcagatattctgcaatatggaaactattgttcttttgcagtaggccatactcattttgcatgaccagtctgtttaatgcttttctagtttgccagtctctagtacctaacttgattcagcagtatgacctgtgccatagtcacttttcagacggatattcatgctgaaatttgtgttcagcttcttaaggcaacatcagccttggccagtggttttcagacttagtgcctgtttaaaacaattttttttttcatggaacccataatgtagtaatgttttgggattgtattttgggagttcatagttaaacctataatagtgtaaacctaatcactgatttcagtgaggctgttttgatgaacacaaattagaaatagtaggggagatttggtttttgctctggttgcatggaatagagagactcccgattcaccagttaagcagtacacatatcacagtttttaaaataactagtcttgcaatctcaggatgctttccaagtaaatagagacggtaggggaagctttattctgagatctgcacaaaagtgggttatcctggcagcacagtgtacctcgtagttgttctctgatgtgtaaaacttggtgtaacacatctgagtgtgtgtgttggtgttttattccagtagttaaaatagacataagacaaattcatataaaatgtttgtagactgcaatgtcttctgaagaatgctgtcagaaaatcattattctaggtccccaggtttacatccctctgtgagacgctcttgtaccagttgttgggtaatttgaacagttgcctttgtggtaccattaggagtctcaacttttaaggatcacttacagttctgtgcataggtgattttcaaagcacctgggtgaagttacatggctctagaaaattgagctttagaaaacagcaataacactgaaacaatctttgggagtgagttatcagagaacgtgcattgttgccaaggatgctggcataaattctgggaacctcaaaataaaagaatccatatttaagcacttcacaatttacctgaaccgaacactggagtcagttcctacctgtttccactaatctctgggtaggggctgggggcaggctctggccctgggtgtgcgttttcaggaggcagttctggctgacttgaacttgttacctgagctgcatttacattctactctctcctcatctgcaactgccccagtttcttctgtagttaggataggcgagtcaaatgaccttaggcaaagaagctgttgaacatacaccaggctcggtgtaacttttcattgttctaaaaagatactctttttccagtctctgggatttagccacccttggaccagggcaattaggtatataccctggagaggggaggaaggtaagtgatgggggggagtaggagagtagcatgaaagggacattgtggacattaagaagccaggaaatctaatcaaaatatggaatgaatagggagaactcttctttttttcatagttataaaatagttacagagaaaaataaagactttagtaaaaggttactgtaaaaactttaggtttcatttcattggaaacgctgttaatatctttgttaaaatagatgaaaaatgtagctacaatctgaaggataaaagatttttgttccctctcttatcccctctgctttctaaaatgctttttttttttaatagaatataagaatttggattggtatatatggggtatatcattgtctaaatctttacgttactgtgttttatttatttttttccctcttgatagaccactttccccagctctttgaggaaagaggggcaaagaggggaaagaaggatgcttggtgtgtgtgtgtgtgtgtgtgtgtgtgtgtgtgtgtgtgttttgtagcagtagtagtagtggcagtaggtaaaagagtgttcactgggttattttcctcatcttgtttcttaggagaaggtttttcttatttatttttgagacagtgtcttgctctgtcatccaagctggagtgcagtggttcaaacacagctcaccgcagcctcgatatcctgggctcaagagatcctcctgtgtcagcctctcgggagctgggactacaatcacatgccaccatgccgaatttttttttttcctagagatggggtctcactttgttgcctaggccagtcttaaactcctgggctcaagcagttcttccaccttagcctccccaagtagtggggttacatatgcgagctggtcttcccttcccttcctctcctttcccttcctttcccccttcccttccctcttcccttcccccttcctcttcccttttgacagggcctcactttgtcaggctgatgtgcagtggcatgatctcaactcattgcaacctgtgccacccaggctcaagtgatcctcccacctcagcctcccaagtggctaagactacaggcatgggctgccccacctggctaatttctgtattttttgtagagatggggtttcaccatgttgcccaggctggtcttgaactcctgagctcaagtcatccacctgccttggcctcccaaagtgctggaattatgggtgtgaaccactgtgcccaacccaaggtttttctttttttgaaagcattatcacttggtgaacattggccagcaagtgtcttggtttctttagatatgtgtagatgcacaggacgtcctcttagaggtaggaagcaggcatgtacacatgtcctgagctgtacttacagcctcaccagcctttggcaagggtttgagacagatgtgcttagttcctgctaagaaggcaaatgtgtctatttctgctgatccctgggccctggagtctcaggagacatttatggacattgactgggattagtaggtatatccaccagacaggatctggtgtagacagattgactcaaacagactctggggaaatttattgagaccttgccctcattgattgctgcctagaggatcttggggctggaggactcttggcagccatctaaccatgtgtcctaacctaggagaagtttcttctgtagcacctccgacagctaggtatctactttttgcttcactattcccagtgatgagaaaagcaaaagcccccaaaagccctgtcttcttttgaactgggatctgcttctcactctccatttcttcttgcatagtctactggaatatcacagaacaatttttctccctcctatccatgagtgcagttcaagtatttgaagaaggttatcatacttttctttggtcttatagtcctcaggctaaataggctcacatcctggagtctcagtccttggaagatgttgttttcagacttatcactattctgatcaccttgctttggaatcaccctactttgtccatgaaccttttaaacaactgttggtgtttggggatcacacatgcttggcgaacacccttgaactgaattaaacagactttctcagtctttaatgggctcctgtggattgtgccttttgaagagggtatggagcctgtggcatcacagcatctgtgttcctccaggcagggtggggaacatcaagctaagtgcaacctgcctggtgaagaatgctacctatgcattgcttggacaaaaggttttgttattgttgttttttaaattttggaagtatccctgatatttgcattactaaaacaataataaaacataggaaagaaaaagcgaacatcacctaatcctatcaatttagatataatcattggaaaaaaaatcagtatttttcatatttttctgtgctaacttacataaaatatatgatatattttaaaaaatggaatcatgaatactattttgtggtatacttttaaaatttaatttttgaggtcaaagctttctagggcagtagaaagcatgatactccatttacccactgtagaggagtactgtagtttatctaaccatgtcccttattgtcagataatttaggttatttccaatattttgccttataactgtccatgtcctcatatttatttctcttggataaattcgtggaagtggaatcattgccatcattgcctaataggcattttgaaggatgctttttttttcacctgattgttatttaggaagtctcaatagagaataaatcctccaccttgtcaatttcattgtcttaaacaagagtctacttggcagaatggcttgttctctttgcttggatccgtgtatttcttagaccagtgctccttggaccctagctcctgaggcaaacctttttcatgcaatttagggttctttcagatctccctgtgtggaagtgttgtcttctactacagtatgtttgctggaatgagaaagtcctgtgacttcacttgtggtttcagagtcacagcttccaagtatcattgtcttggcagaatcagccatagctttttccttggctgaatcctaggtaggtgtgagcctgtattatatgattcagatctttgcccttgtcgtgggactttcttaccttgggcctttgaatgctctcataaatggtagttgagtagattcacaaatgataaggcacatggcactttcattagatgaaatgtaattaacaagaaccataagctaatatgcatgtagaactagtccaatgtcttagaagataatttagtatcataatgaaaggagacattgtttttcttcccagacagttctgaaggcagttgattttatctgtatagccaacaacaatttcttaagtctcatggtccttccccactccactagaagctgcagagtagtccttctcattctcatttactgtcccaatttcctgaccctttcactatctccctgtcctgggagaggggtgtccaggtgatgaggacctatggcctcttttctgccatgaggagctccttgtggagccctgtcctccttgctgaggccctcaagagtgcagcctgcttttctgtgtcctttcaaagctaccattgtgtactatgttgcttgtggctgtcttttctttcaagcctggcagataggatgatattcctcagggacctccttatttgctgtctcagaaaacaagcacagaggactttcttagttaccctgtagaacagacaaagaaaatcaagacgcccagatgcggggaagtgactgagaaccttgcaaggttcttttaaggcaatctctctgctctttgatgcctaaccttatggggcacagccacactcacttgcagaatctgagctaaggtgtggccaggagaagtccaggccagtgaatgttatcagtggtcatttcttggtttcctgaatccatctgtcttaaatcagctgtcactagcaaccaaaaaaagatcttatcatctgtcataggcatgacctgaagagaagcagctgtgctttgttttttgctaagtcttgggcagttcagtttggcacttagagtattccagctccttttcttataagaatatctatctttatctatctatctatctatctatctatctatctatctatctttaactaactaactaactaactaactaactaaagcattttaaaacgtggcatctcgctttgttgctcaggctggtctccaactgttggactcaagcactcctcctatcttggcctcctgagtgtctgagactacaggcacaggccaccatgcccagcctcagctccttttcttttaaatctcttggtccaatttatattctttgccagcatccttgggacagcacaaatgttgaagtttggggaaacattttgtacaactttgttcactgaatcacagtcactgcttgtgctgttgataatcaaaactaggctgcacagagtgacgtagtcacatatttggcttgggtgtacagatgtttcccttcaagcatcttggatgtcttgctccttatcagaattttatctcccccaaattcattgtttgtgaattaactgtaaagttctgggagcgatttccttttcaacagtttgcctttctagaaaaaaacttttggagtttaaatagcacttaaccctctatcattttactctctctgaagtggtctctgtggagaacatgttgggtcttctctgttcaatatctctctctctctttcttggcaaagcctggatgcgagaagttggtccaatctttcctgtccagggttgcttgttaatacagcatctggagcaaaggaaaggctattagcaccttgtcacttggagtttcttaagcattgttccatttatgtgttctttctgcagagatttaatgaaagtggcatctgtctttacacctgacatatgcaggttgtccgcagaactgaacaagtggtgtcagcaacactgtatatgcaggaaggcttcatgctcacgtcgttttttctgtgttctctgggagtagccaacttctttattcatcagagtagggctttacattttaatattctagagagagatgcttgtggtgatatatttagccttaaattcaggaatggcttcttttttcaatgtctttacattttacgcctcccattttctgtgttaataggtaagtgtgcctacatttaaattctgaaatggcatttgctaacatttaatcttggccaagttatttaacttctctgtgccttactttcttcatctgtaaaatgggtgtaataacaaaaaactacattgtagctttgttttgaaaattaagtgggatattacatataaaatatttcataatagtgcctggcacatagtaagtcatgagtaagtcttagctgttattgttaggggtagtgtcgtgataatgctaaatgctttgattaaaagaatctaattgtatatttgagtcacagattattcagatatattttatataaatatttcaaaagaaatacctcaactttgcatgtcttcctggccctgtacaaggtacatgttgttatgttttctctgctcagagctattttaagccagtacagactgtctacagaaatgggtttagaatgttttttcactctgctgttcttaaagagggtacactgcttttgagaaatcttttttaaagaaagggttcaagttcagtgttgagaaatttgtctctgaggacaacgctgtgcatttccaatacgtatctgtttttcatcttgctttcattgcagatctgcatgtatttagatatatgctcaagtccctctttcacttcccagttacttagagtgaaaaaaagaaaacatcagtagttggtgcctgttcattcacttagggctttcttggtcctttcagggcactgctgtctgttgctgttgcctcactcagtttgcttcctcttggatttcagttatgattgcttttttttttttttttgagacggagttttgctcttgttgcctgggctggagtgcaatggcgcgatctcggctcaccgcaacctccgcctcctgggttcaagcgattctcctgcttcaaattcccgagtagctagtattacaggtgtgtgccaccatgcccagcttattttgtatttttagtggagacagggtttctccatgtttcagggtggtctcgaactcctgacctcaggtgatctgcccgcctcagcctcccaaagtgctgggattacaggtgtgagccactgcgcttggccgattgcttttattttatagccggtccttgatcgggggtgcagggtgcattatctgagttcattggtgtgtgtggctctgtgtctccatagtcagaaggattcctgggcatgctggattcttttttttttttttttttgggaaagagtctcactctgttgtccaggctggagtgcagtggtgcaatcttagctcactgcaacttctgcctcccgggctcaagggattctcctgcctcagcctcctgaatagctgggattacaggtgcctgccaccatacccagctaattttttgtatttttagtagagacggggttttaccatgttggccaggctggtctcaaagtcctgacctcaggtgatctgcccgcctcggcctcccaaagtgctgggattacaggcctaagtcacagcacccggcccatgctgggttcttaatctccaggctgtgctggactctcaccttctaaccaaccttgaggtatttcagtcccagcactattgacattttggtcaaaacaattgttgtgggggctgtcctgtgcatgataggatgtttaccagcatctgtggcccctccccactagatcctggcaccatcacccactcttcccacagttgggataattaaaaatgtctccagaggctgggcacggtggctcatgcctgtaattccagcactttgggaggccgaggcgagcggatcacctgaggtcaggagtttttgagaccagcctggccaacatggcgaaaacccatctctactaaaaatagaaaaattagctgggtgtggtggcgggtgcctgtaatcctagctacttgggaggctgaggcatgagaattgcttgaaactgggaggtagaggttgcagtgagctgagattgtgccactgcactccagcctggggcgacagagtgagactccacctcaaaaaaaaaaaaaaaaaagtttccaaacattgtcacatgtcctttggattgtagaattggcccccccactgagaatcattggtttagatcagtgggtttcaaatgtcagagagcaggtgtgtattttatcatatttagcttctagagttatgtctaagtctcgaaatttacagttttatgatatagccattgttgatttatctaaaagtctatatgcatttaaaatgcttatttttgaaatatttagataaccaaatctgtatgtaacaaaaataacaaatcccaccacatagcaatttgtcttgttttaagatacctaaaagatcagaccagtggttctcaatatttggtcctgagaaacagcaacattaacatcacctgataacttatcaaaaatgcaaaagcaggccaagcgtggtggctcatgcctgtaatcccagcagtttggaaggccaaggagggaggatcacttgaggccaggagttcgagaccagcctggccaacatggcaaactcctgtctctgctaaaatatggaggcacacacttgtaatcccagctatttgggaggctaaggcatgagagtcacttgaactcgggaggtagaggttgcagtgggctgagatcgtgctactgcactccagcctgggtgacagagtgaaacttttcctcaaaaccaaacaaaacaaaaaagcaaaatcaaagcataggagacctatctagacctactaaatcagaaactctggcagtggagccctgcgatctgttttaacaagcccttcaggtcattttgatgcacactgaagtttgagaaacacttggttagttacttaggtaactaggtaactaagtatattactaagttacttagataattaagttagctccagttagagacccatagaataaaccttattgagaaataagtataacctgctatatacagaactttgaaatctgcttaggaaaatgacttttaccagacagatcatgctaagtgtgtgctggtcatattggcttccctgcaagagcctgccatgtccacagctttctttacaggatttccttttgttagtatccccaagcttggtgcatgcaacttcacagtttggtggccatagctgcttgaactaggtatgcttatgcctgactcccaaggtacgcatcgataggctaaccagcagcatgtattgggaagagattgatcctcttgggagtttgagacagagacaaagaaatgggaagacagcaaaaggcatgaggaataaaagcccttagttaagcagaaaccatgaggagatgaagaggctcttaatgagccagtggtaacaagaacaataggaggtggaattgggtgacagagcacaggatggctgctttggaaagggtgacttttagaatcgaagttgagtcaatgtacttaaactaatatgtgcacagtatgttttagttttctagaaggcccaactgggcagctgctcataggggttcctgttttgtacttccctattttgcttgcttctctagggagcctcatgttaaatcatcattaactgaggcaatttcataatatgtctattccttgttgcctggatgaacccattgaatatataactatattagaagaccaagtggtttcagatgggttgcaggtgggtttcatggcatgctgcttcgttgaagcagtgactctcagcctggctgtgcctcagaaacacctgggtagcctctgcctctttatttaaaaactttctgtatgtgagattctcacgggcagttgaagtctgtattacaggagagaatgggagatagaagctgttactttcagcttgttgatgggttgactttcccaaaataaagctgcatagggcgtacttcagaaaacttcaggccttacttcattcatttccttagatcagaccaaataagccagctcaccatatttattccagagatgtgttgctttgcctccaataacattttccttaacatttcctgttagagcctctgggtactatttcttttgagggagatgctaagagtttgaaaagccttaaaaaaatcattaaaaatacatggaatagagtgttgaaatcagcattgtaaatcattttctgaaaattcagtaagtctaaagaagtttttctgttttgaatgatcggcactgaccctatccagttggtcagtgcctcccttatcctgctagtcacctcttcctcctgtctttcctattagaaccaaggaaagtatacaagtacctccatgcagcaaatccactggattctctgacacaaatcaatccagaggggaatgagtgaagatacagaatactttacattgttgctcagatggttggctgagttccattagggtaatatattctgggaatgtggtccagtgcttggtttcaaggccagcttaaaagatttggggcctgaccaagagcataatcaggattctcttattctccaacctagtatccttgaggagattgtaaactactcgagagtccaggactgtttacctattgtacttttatgttaagtacctctacccctaaaagcaatctctttgtgatatacacagaatatttgcccagtaagtcactcagccttgagtacaaattttaagcccgagctgctttcctcaggggcccagccagtctctttactcagcagccttatctgacatagcccatctttaatttagctttgttcacgatgcagggatcaataacagcgatgctgggagggagggagaatggccaactgcaaacagccgcccatctcagcacttgaactgaactctactttggtcaggatgattagtgcagtctggagagccattaagtgctctctgactagttcatctgagttctgcttcccactacactcaatgactaacccaggagattacagatgcttgaggagaaagagtgtcgtgtctccctgtgtggtactgagtagtgtttgtaccactgtctcaggaatgtgaattacagtgcaaatgagctgcctctcttgtttccttttctgcacgtcattttagagagagtgatttattttctgtttgcgaaggcttggtctcatcatttagatgagagagaaattgcatgtactttcaacttttggctggttataggcatctcctttttttttttttccattgtgagagttgtttatgctgattgaatgaaaagattcgttttcttaggctttcagtgatgacactccatttcttccatgtgataaaattataatgcgtgattttattttattattttttaaaagtaaaactgtcacctaacatttcctctacagttgggtaaaaaactaagaaaagcatctcatttcctattggttccatgagcaaccctttttagcatacagatcagaagccttgtgtggctctaagcctatttcctcaattggggaagtaacagactctgttcccaagatatgaataggtgtgctgggtgagaagtgctctgtgctcaaggactttgacccttcattttccaaacttaaacaagtttctccatttctctgttcttagaacctttggtattcatatacttaacatgtacatttcttgaagcgccaattatcatctcacaggacactggtgttccagggaacttggagaaaagctgacaagttattttagtgtgttatcttttacacaaagggactctgttttagaatttgccatatctgctttaacgctgtacaaattagccaactggagaaatatatgttaaataacgggtgaacaacacataatcacccaacctacttttaggaagattactaaaacattccatttaacaatcattcagcactatctgtttgtaaaggacacgtaagttttaaaggaagaagctggtgacttgggaatggactggaataaagtcagagaagtcctttgtccagggaacttcatcattgggtttgacttgagaagaacaaatcagataagattagtctcctcattataaatgtttaaggtaatttcagatcactctgctttaaaagtcttgtgaaatggggttgggaaagtttccttaaatcatttacacttgttgattgtgtgcagtttatattatgagcctgctgcccccacaggtgctgagctgtgctcacacatgggaggggacatcacagaaaagaagacgtagatttattacctatggttctgaactgggacaattgataaaaattacaggtgctgaggattggcttgaaacgcagaataatcttcctaacagagctgtccactcatagaatgtgcttattgtgagggtggggatagaggatggggaattgaattccttgcagctgggtaagttcaagtatagattgcttgccctcttaactaggatgtcctatagaacagccgtccccaacctttttggtaccagggagtagttttgtggaagacaatttttccacagaccgagtgggtagggggatggttttgggataaactgttccacctcagatcatcaggcattagattctcataaggagtgtgcagcctgcttccctcgcatgtgcagttcacagtagggttcacgctcctatgagaatcaaatgccttggctgatctgacaggaggcagaactcaggtggtaatgtttggtcacctgccgctcacctcctgctgtgcggtctggttcctaacaggccacagactggtactggtccacagcccaggggttggggacacctgctatagaacattcaagtaggaaaatacttcctttggtctaagattctgaaatttacaatgttccctgctcatatatcaaatgatgtattagctagagcttattgaatgtcacagttttactgtcaagaacttaaaacttctattatgaggcagagcatttggtaaggatagttgagtccctcagtgactgtttggattggttctatgtcctaggattgagtacatgatatcattttgatgaggttaaaatccaattaggaggtctgtccctttggctgctggctgggtttgttactttttagttccagtagagatatgtgaagcttttctgaacatgtttagcaaggtttgattttggcatttctgaatataactgtgagaagaattatcttcctgctgtcctggtggcagaagacattggactttgtttgcttgtctctttgggggcagatacacgggcatttaaagagccattctaattttaggaacttgagaatcaggagtcctgagggttagtgctaatactttaaaaggttcttaggtctgcaattttagttaatagtgtggggctgaaaaagcctttttccaggaatattgtgagagtaagtgggaagtagagcttttagaattttaggagaaaagggcatggctatttcagttaataatacatgaagagttttctcctttcagagtcctcctttctttgggtttcaaaaggtaagacaatccacgggttttttagtttgtctttcaggtgaattgtaaagttttcctgtaaatactgtcattgcactgacatggatattgctgagcagataaaacaaatagcaagttgaggaggcagttaattcacactcttccttctctaatatggtctgcggctctaagaattgttgtctcatccatggcttttagacccttaaattttagtgagtttcatcacacggaaactattgataatttcttcttctgaagttttttgtaagtggtccctgctagctaatggtgcacaaaatgaagcaatacaacatttctcttatggggactgggagagaactgacatcctttataaatatgtagctgatatataggttaccagcctaagggctgcctggtggggaaagtgaggcctgtgcctgtctctaccactgaagacatgttcatcaagccaatatatgcctcagacattaaaaatatcctttttttcattttaaaataattgccattaagtatacataacataaaatttaccattttaaccactattaataaatatatgttcagcggcatgaagtatattctcaatgttatgcaacgtatccatttccagaactttttcatcccaaacagaaactgtatcaaacactgagtcctcattccacctccccatcgcccctgacaatcactaatctactttctgtttccatagaaacagaaaatatccctatttggcatgttttatataaatcaattatataatacgtggccttttgtgtctggcttgtgtcatttagcagaagggtccccaaccccagggctgcggataggtactgttccatgaccttttaggaacctgggtcacacagcaggaggtgagcggcaggtaagtgagcattaccgcctgagttctacctcctgtcagatcagcggtggcattagattctcatagttacgagaaccctgttgtgaactgtgcattcaagagatgtaggctgtgtgctccatatgagaatctagttgatgctcgatgatctgaggtggaactttttcatcctgaaaccatctctcctcccccccacttttattgaaaagttgtcttccaggaaaccagtccttggtgccaacaaggttggggactgctgacttagcatatgttttcaagtttcctctatgttgtagcatgtgctagaagttcattcctttttaatgctgaataatattctgttgtatgcatataccaatttttaaaaaagtcattcatacttcaatggacctttgaattgtttttattttttggctactgtgaatactattgtgaacattactgtatggctgaacattgctgtatctgagttccttctttcagttcttttgagtatatacctaggagtggaattactggatcatatggcagttctgtgtttaaccacctgtttcctgcagtgccttggctttttttttttttttttttgacgagtctcattcttgtcgcctgggctggaatgcactggcacgatctcggctcactgcaacctctgcctccccagttcaagtgattctcctgcctcagcctctggagtagcttggcttacaggcgcctgccaccacgcctggctaatttttttgtatttttagtagagacaggttttcaccatgttggccaggctggtctcgaactcctgacctcaggtgatccgcctgccttggtctcccaaagtgctgggattacagctgtgagccaccgcgcccggtcgccctggtccttttgaaactgggcagtaatacctgtgcttgtaagagtgtttacaaatatttatcagccttttggaactttaaattagaaaagtgaacagactgtatttgttagcactttatatacttacattatgtcatggaacttattattcgtgtttcctgaatgtctgttgtttggatacctgtgtgtgtttcctactctattagaaattccttgacctgatctgcagttctccatctttgtccaccttttttgtaccttgtactcaataaatgtttgttgataaattgattagatgtgcaacatattctaaagtattatttttaaaaaagagatccatttacaagaagcacattggaattatttccaggttttgttttgctaaagttaagatctgacattatttgttaatttctcttggttatggaatgaaaagtattcccactgttaaaaataaatgttagatgtaggaagtaaacagagatgtatttagacattggggaaaggcttccactgggatctgaaatattgtgggaagagaatcgctattgttagagtagttctgtgccgtgttagtctttattttgtttagatactgcttttttgggggaccactctgcaggcatctaaatctgaagtgtaagcctcttttttgataaatgagggatagctaaaagatgggttattttggttattggttttgcttttaatagataaccagaatttttacctcttgggagagaatgttatctacttatttatagcaagcaagtgttgttacggcaggtggctgtggatgttggcattcaaatggcactgataagactttaaacaaggtagccatccagttatgcttaggctaaaaaatggctgtgtgcagattaggctacatatttcacatggatataaagttctacttttattaacaaacataacagtgcattgcttttgtgtttttagtttctcttagcccttatttcttgtctcttttggtggcttgctgttgtctatagctgagctgaaactttctgtgcaggaattaagcttaaaatatcagtttgtagtcagctgtggagtatgataaaactttgagcaacacagtttccaacaacacccctttgtcactgtgcctgagaaagctcttattaatagaatttcatgtgaggttccgtgagaaggactattgtacaaccattttttttttttttttttttttgagatggagtctccctttgtcacccagactggagtgcagtggcacgatctcggcttactgcaacctctgactcccagattcaagtgattctcctgcctcagcctcccgagtagcagggactacaggcgcgtgccaccacacctggttaattttttgtatttttcatagagatggggtttcaccttgttggccaggctggtctcgaactcctgaccttgtgatccacctgccttggcctcccaaagtgctgggattacaggcgtgagccactgttccggccatttttttttttaacagtgaaacagggaaacataatatttttcttactttaaaaaatccttcagtttataatcatcaggagtattggatatcttttaagtgaaggtggaagttcacttaataaaaaaggaagctcatttttccttctttgaatggttaacatgggagtaccccaaggtggaagctttacatgactgagaaagcccatccactcattgtcatagaatcaactattaattcaacaaatacttatggagcctttgccatgcctatgagccttgtgctagaagccagggataagtaaaataaattctgcacctgcctcctgcaacttagtccaatttccaggtctcccttagatttttctctgttttaatttttattttgaaaatggagacagggtctcactatgttgcccaggctggtcatgaactcctgggctcaagtgatcctcccgcctaggcctcttaaagtgctgagattacaggcatgagccatcacacctagcctctctcttaaaacaactttattaaagatgtaattcaggctgggtgtggtggctcacatctgtaatcccagcacttgaaaattacttgaagttgggaggtggaggttgcaatgagctcagatcatgccactgcactccagcttgggtaacagagcaagagtccctctcaaaaaaaaaaaaaaaaaaaaaagtaattcacataccatacatttcacctgtttaaagtgtacaattcagtggctattagtatattcacagagttgtgcatctattaccagaatcaattttgagcctttttttttttttaaccccaaaaagaaacctcttccctttaacacttatccccagtccacctatccttctcagcccttggcaacagctagtctactttctgtctctatggaccggcctagtctagatattttatataaatggaattatataatatgtggccttcatgtctggcttatgtcatttagcataatattttcaaagttcttccatgttgtagcatgggttagaacttcattcttcttttattatggttgaatgatattccactgtatgaatataccacatcttttttttttttttttttttggagacagaatcttgctctgttgcccaggctagaatgcaatggcacgatctcggctcactgcaagctccgtctcctgggttcaagggattctcctgtctcagcttctcgagtagttgggattacaggtgcacgccaccgcacccggctaatttttgtatttttagtagaggtggggcttcacctccttggccaggctggtcttaaactcctgacctcatgatccacccgcctctgcctcccaaagtgctgggattacaggagtgagccaccccgccgggccacatctttttttaatctattccttcactaatagattgtgggttgtttccaccttctcactatgtgagtaatgctcttatgagcgtgcatacaagtttttgtgtgggcatatgtgctcaagtctctgatcccctagatgtcttgcctatcctacagatccaggcctaccacaaaaaagtgtagaaggatcatataccatgagaacataaaggagggacatgtagacttaattagggagtcagggaaggctgcccctgaggccaccatatccaagctgcggcttgagagataggttgaatagaaaagtttttcaaactgcagctgatcacccattagtaggttgtgaattcagtttagtgaatcatggccagcattttttaggaggtgaactaaaatagaatagtagatgttagaggacattccatgtggtaagggtaagtattgttgcatgaaatttattttcagtagctatatgagcgcatctagcaaattgtgacgtaagaagtattctatattccgggttgcaatcagaaaaatatgaaagccactgctctagggattttttaaaaggagattatttattaatctggagctttaaatatggttccactagaagattggagagatacaggagagagaagaacctagaaagctgaagatcctttgaaagcttaaagttctgtgatttctacacttttaaaatgattcatttattcaacaaatattaaaatatttaccataggcctagattgcactaaattctgggagcatatgtaagatttgtgtgattttgttttttttgtgatctggcagagaagatgtacaagcaattaaaatgacttctataaaacatggtgggttgaggccgggtgcggtggccaaggtgggtggatcacctgaggtcaggaggttgagaccagcctggccaacatggtgaaattccatctctactaaaaatacaaaaaactggccgggtgtggtggtgggcgcctgtaataccagccactcgggaggctgaggccagagaattgcttgaacccaggaggcggaggttgcagtgagccaagatcgtgccactgcactccagcctgggtggcagagcaagactcttgtctcaaaacaaaacaaaacacaaaaaaaaccatgacgggttgaacgcataagtacctttagtttttccaaaatgtctctaaaatgaaataaaataaataatgaaataaaaaagacacaggcacctcaaaggtaggagaataggagaggagatcacagcagttaattgccatcaagatgtctttggaaggagtcactgactaagctgactggcttagtcactgactggctaagcagaggaagctggactctaaggatctcaaagaggatatcagtaagtgagccagttagctccataaaactccagaaaagttcaggatttggaagctctaggtcttgcataaggctgtaggatatatagagcgggggaaaaaaagagcattagatggagatctgtaaaagctgttaagccccagttcccacccccacccatcagatccaggtgcttgcccctcctctcaccctgaaggttctattgtgaaaagctgtaaatcattagccatccatccccccaacctgcaaaggtacacacctaatagatatgatacacacccatcagaaacaatggcacacttagtttagaagggaaaagtgggcatacccttgtgggtgtgtcatgatcttagagggccaggggataagtagtttgaaagtgatctccaaggtgattttgaagacacaattctcccatcccactctcgattactagccactgattttgtctcaggaggcattagccgcctgtcaaactgctgggacattatttttctcttagtcaataaaagtagtttgacatccatcacatatagcatttgctaggtcttgtgggaggcaacgattacaacaaaagggtaaaatattgtcctgtgctcatggaacttcaaatctagttattggtgattatatacattctaaattaaacactttcaaaataagacatcttgtcaaggtgaaggattaaaaacctttttgtcctatcctgtctatatttcctctcaccccctcccatctgggtgtgctcagataaactttagagcacccaaggtttatagaactcctgacagcgacctcaccaaaggctggacttcctatttgtcataaacttgttgaaattttgtttgactgctttagtacaggagtatattccccaagacaagagacctgagagcttttccctggttaagataccaaggatgatttccaaattttagacatccttccccttgttccaccaattttttttttcttctgggaaaatagccaggatgattgcaaaacataagcttgtaaaaaggcaaaactccatggatgtaagaaagtaaatttcttgagggccacacccatgataacgctggaattttcatttaattcctaactcattttttgttgtttttgtttttttaaactcaaatgtgtctctttaattgaggtcacttacttggttgggagattaatattctggtggggaaactttctttttagagtttatattgttttattccttcagtcactcagtattactaatggggtagcttttggaattttccatcccccccactttcagattacttttgtctttttttttttccctgagaaattagtgaaaacagtttgaagtcttgccacgttgtaaggagatttgcattatttaaggaaacagctggcagatctctataatgccccacctctgttctgccagtgcctaaaatttcctttgcatgactcagttaaaaaaaaaaaaaaaaaaaaaaaaaaccagaggaggggaacgagtggagagaagaaacccttgtttccctttctgagttgtaaaaagcttttatcaaggtttacatttagtcatgcttctgtcctctagtggatggcagcatgtgatgaactcagagaaactcttctcccaaattggccagtaagaactctgcaaaaactgtggatgagctgagcttacctcccataattttattttgaaaataaaaaattttccccacatagtaaacacagttatcttcacgagtgtgggaatgattaagaaaaaaaaaccaagcttagattttgcaagatgggtgacctgaagttttgcctagagggagagaagggtctcttcctcctttcactctgttcttgacagcgcctgcagcctgccctggaagaacgggtttcttcttcagatagaaaggaattgctggctcttctgccagccttgcccataggcctggctgtttccctgatgcaccttccctgctcaagttgctatccttatcattttatatttttgtgccagtatagatttggtcctataaggctgcagatacatagtgggcagaaagatggggggatgagagcactgagcctacaacctatttggagggactctgggcagcatgaggatgaggggcagggccagggccaccgctaactagttagcagtcaggcaaatagtcaaggacagagaccttgtatacattaatagtgccagcattttaaagatctttacccagggaaggctgtatatatacagttatttgggagaaaccagaaatggtgtatttaaaaaaattggatgccttaaacttccaaataaatgcgttttagagctcacttatctggaggttggcctataacattccctctctgatgtcttgcctttcaactgttttttttcacttctcagagtgggcatgagaaaccacaggatgtagaaacatggagtcagttttgctaaagcaggccctcatgagacttggaagggaagaggtgatgagtccaatgagagtttaaaattagatgttcagttattgattctatgttttctttgtagtcagtctttttctaattaaagtgggtaagacatttgaatatagggagataaatgtgctatgttaaaggatataaaaaaatcctggaggaagtctgaactctaaactctttggcaagtctttctgcctgaattttgaagcaaacttaaagattatatatgtggctgggcctagtggcttatgctgtggctcctgaccttgtgatccacccacccgcctcggcctccatcccagcactttgggaggccgaggcgggtggatcacgaggtcaggagcccaagaccatcctggccaacatggtgaaaccctgtctctactaaaaatacaaaaattagctgggtgtggtggcacgtgcctgtagtcccagctacttgggaggctgaggcaggagaattgcttgaacccgggaggcagaggttgcagtgagctgagatcacaccactgcactccagcctgggcgacagagcaagattctgtctcaaaaaaaaaaaaaattatatatatacacacccccacacacaatacatacatacacatatatacgtatacatacacatacatatatatgtatgtatacattcacacatgcacttatatattcacaatgatagttaagctagtttttgccctccttatcagtatgtcacatatccatgttgtttcctggtatatccagctgtttccttaatgagactgcctccatctttcagatatttaccaacagttgagtatatacttggctttattgcaggacctggctatgatacagatggatgtactctgtatagatgcccaaaataacttttatttttatgatggttagattttgcctgcatatttaaggttttgctgtatatactaatttgcttcagagtcagaaaaatagcagcaaactctgagaggggactgaaaaagtatcactgacttaggggttattatagtaggaatggaactacagagatagcctttgtcactgctttgtgagaaagcagtggagaaaaatacaatagctcctatttattaaaagcttcctatatgtcagtactatatgtattatctgttttaatcctcacagtaactgtgtgaagcgggtcctaattatcttccttttacagatgaagaaagtgaaggcagtctttaggtgtcctcccaaagttgcagaacatgagaggcagagtgtggatgaggctctatgtcttagattataaggacagtgctcatttccattgcattaaggaaaatatcctagtctatcctgtttaatcctaggaaccctgtggtgtggagaggttttctcttacataccaattctaagcctctgctttgatcctttgtcttggtaggcatcttctctcctcatttactgctcactgtgtgaggatgataggcactcctcagttataaacatcgcccttgcaaacatagcagcttggtcgctctctctgcggtctaccctaagggctccctaaatgcccacacatggcggcaggtgccagactggggcccgagcagggcactggctctccacagcctcctccataccgctgcctgctttttttctctcatctcttcccccacccgccattgtttttttgtgtttccttccaggcagattagttaattccacctcaggtaatctcttattctttctatgacaaaatgcattcttagtttcacactgttgtcatataaatgaaggaaccctttcacacaaattgggaattggcaggatttgattcatcaatattctaggctgttagttttccttttgctgtgctcacacagaaccagatacagcagaattaaagagtaataggcaccctctagtcccttgctactcaaattgtggtccatgaccagcgtcattgccaatacttggggcttgttagaactgcaaaatctcagcccctcccaggcctacagaaccaggtcctgtagtctaacaagatctgcaggagcttatttgcacattacacttgagaaacactgtaagcctaccctatttctgtccttttcttcctaagctaaatgttatgacttggtcacagctgaaagccttcagtgccattattagtaatgacgttggtgctgataaggtttgtagataacattaaactgaaaatgtttcttgacgttaaactgagaaatgcttctaatgaccaggaagacagaattgaaagtagccttaattaattgaagtgattactgtaaaacaggttaaaattgcatagggaacactgcctgcctggcgaagcattgcatggtgtgaggagtgggcacaggcgcagcactcaggtgttttgcgtttgtctagaaacactgtcctttcagtccttaagcctcatggacagctgtttctcggggactgtcagggtctcaattttgaattgtcttactgattttagatgagatagtttatattccagagggcttttttttttttttgagacggagtcccactctgtcgcccaggctggagtgtgatctccactcaccgcaacctccatctcgcgggttcaagcgattctcctgcctcagcctcccaagtagctggaattacaggcgcatgtcactgcgcctggctaatttttgtatttttagtagagacggggtttcatcatgttggtcaggctggtcttgaactcctgacctcaggtgatctgcctgcctcggcctccaaaagtgctggaattagacatgagccaccacgccgggccattattattataattttttttaaagactagtctagtgtaatagaagagggaaagagaagaacaagaagttctgtctgtaactgactgtggacaatcaatggagataattcacagcctgcagattagccagagggccaattgttaaatcctcattatgctgccactcttgagtcctgttaggttactagaaagcagtgcacctggagactcggtacttctgtctcagagctgtctttctaaagtaagatttagcattaggcccttagtttttaactgggaagttgagcagagagggaatgtttgaagactgttactacaattttaaaactaaaaggtgtcactgagggtactgagcgtgctgtttattctctaatgctcagttccatgggagaagtttctctcaaagttgagttagggtgtttttttcctaaatgctttctttctttttttgggatggggtctcagtctgttgcccaggctgaagtgctatggcttactgcagccttgaccttctgggctcaaacagtccttccatctcaacctcctgagtagctgggactataggtgtgcattactgtgcttagctaatgtatttttatttttattttttaaagatgaggtctccctatgttgcccagtcttgaactcctgggctcaagcaatccttctgccttgacctcccaaagtctcaaagtgttgggattacaggcatgagccactgcaccaccctaaatgcttttatttagtgagagccataacatcatattgtttccatattcttttcatcttccaggaaattcctaagcttttttttttttaaactatatgttggaagctttcctttacttaggacttttttttttttttttttaatagagatgggggatctcatcgtcacccaggttagaatgcagtgataccatcacagctcgctgcagcctccacctcctgggatcaacccctacctcattctcctgactaggactacaggcactcaccaccacactgggctaattaaaaaaaaaaattcttttttgtagagaagtggtcttgctatgtcacccaggttgatctagaactcctgacctcaagtcacccgtccgcattatcctcccaaagtgctgagattacagacgtgagccactgcacttggcctatttagggcttctaattcactttccttttccttcttgtctaattcttgtgtttttagaatctgcattttattttaagtcatctcaaattccttttggaagtagtgagggagtaaatgctaaccttgtgtagaaaccgtaaagcgtattcaatttgtttctgttttatgaacttgaccttgtgtgagcatcagccatatgcaggactattgggcttggaatgtgccagaccaagcagtctctaattttgttctcagttcagagttgaggggctgaggaagttttgggcaagagtgaggtctgcttgggaggattgccttgacagctgtgcgcacagtgggttggaaggggagcagcagggcatccgtttggcagctgccttggtggtctcagactaccgcatccatgctgaaattggaaaggagaaggtcgggaagggaaagactggggacaaagcggactgatttgggcaacgggtgaggtgcagagagtaaggaacagggacgaatatatgtgaccctggttatcaggccttgatgttgctttgaaaacagtcctctccagtttttgatattttttcttgtatatggggagcttgataaactaagccttggacctttgttgttttgatctgagctctttgtcatctgtcctactccgggaaatgtgaagtggctgcagaaggcacctaacctgttcttgttcccttttctctgcctcgtacctcaagttttctaccactagaggagaggcgggctgaacttccttagcaagatctctttcattttttgggagtcccattttctaatacaactccagacccatcagccacccgggagaccccacgtgggagctgcgttccctttgccagggagatgctcctgggagttgcattaggaaggcgagtcaggaacagatggctgtcctggggggtctggatgtcggcccagccccatctcctcaaagccattgtttgccctggtttgtgaggtgctcaacagcagggacagatgcaatcagagaaggatgaaatgctctttttctttggacctgaaatgggaccctatacttagtgcagccttactcagtgactaccaaaatttgaaaattgtgtttttctgaggctgggctcattgacttccgtgagctcttattagctgtttactcatgaattaggcaatttaatttgggtagaggagggcaaatcaaatgagaaggagctgccgtgtttaaaattactatgaggatagactgttcttaaaggatcctactcaagcctatagaagccttccttagcttacatgtcgagtaaattaattagacgaattgtgaattattctgatttattcagagaaatcctttgctctgcaggccgtactgggcatcatgtggctgacttcttgttctgactttctatgaatgtttgcaagtaataaaatatatttttatgattgagacttatttagtaataatatttaatattaatatttaataattttaggaaaataatttaggtaaggttttgctgtgtattgtagcatgcattcttctaagccatgccctttgatattaaaagttgtgctagtttcaaagggctcgatttccttaacaggaaggcacctataaatctggcagtaggtaatgaagggagaatggtggtcttttcagtaggggagggcagtgcacacagagagttatatgttttttagtctaactgccctaatctaatctcatgaaaggtacatacacatttaatacacatttttctggggcccatagcttttattacattttcaaaggagtagatgactcctagaagataggaacctctgcagaataacttcttgagtgagataacattgttgcgatttgagaaatactgaatctctacatttggtcactttttttttttttttttttttttaaacagagtctcgctctgtcacccaggctggagtgcagtggagagatctcagcttactgaacctccacctccggggttcaagcgattctcctgcatcagcctattttcacctctttaaagaaatatattgttatcgctccctgaaagtggattagttaagtactgtttaccctgcctatgaagaaaacttacttgcacatgttatgttcggacattagtcaatgaagattagtcaatgagaactagtcgatgaacatggtcaatcttgcttaaagactcaaaatatgctggagtatggtgttaattgtggtagtttatggcatttttctgaagagaaaaaacactccagcaaggtaggtaggatagtatattctctgtcttcttcctcctgcccacccctctgtctacattagaaacaggttttggaggagtagtgggaacattgggtgatttctagtggggttagagaaagcagtacctggttctttggccacatctaccaaagcaaagacctagacttgtagaggagagtattgtttgcttgtttgaggattgtatttcccaggtttgttcatttgcatgagtggctgaataatgtaacagagacttcagaagtaaggaaaatggttgtcaccaaaatatcttgttttacctttatttggactaaatggaaaacacatgtttaatagctaaggctattgagtgcttatcatttgccaggaactgtttctgagcctttcacatataacacctcattttatccaccctctacccctaacaaatggtgtggtttgagttggccttggtgaggtatgaaaaggaaacaaagcagtgacctcttcctgcaggctggtcagatgtttgggataacattccttagcattcttggtggaagtggtgatttcgttgaaagctgcttcccagttgctctggagtgcaggtgggaggggtggactttggcttttccaaaggatcccaggaatgggaaggaccttaaagatctagaccaggggtatccaatcttttggcttccctgggccacattgtaagaagaagaattatcttgggctacacgtaaaatacgctaacactaatgatagctaatgatcttaaaaaattgccaaaaaaatctcataatgtttaagaaagtgtatgaatttttgttgggctgcatttaaagccatcctggactgcatgtggcccatgggccatgaattggacaagctttatctagactgttctgaactactcatctgcctcccccagcccccacccccaccccacacatccagaattctccacccattggttgtctggcctctgcctgaatagctgagtacctgtcttttccaaaactaccccttgaggggagacttacagcaccctgtagcatagtatatgatatttggctagtaaaatgtgatcctttaatatttttcaatctttattgagcacccacccacggggttggaggaatttagggggttctgtggcaaaacaagaatagagtctttgcatttgacttctcagacttgtagggacatacaggtaagctggatgttctggtgagcgctgctagaggccacacaagatgcttccaaagcctagaggagggtctgatccagccttgaggagacaaggtggcatctgaattaatgagtgcattaatggtgaatgcatactgttattataaagctcagggatgttacagcctctgatactttacacaaatagaaaggttaaggtaattttctgtataaaataacaaaaataccatctaaaaatgataacgcaggaaatttgaatattcagtactgttttaaacctttcattcttttaattaattttatttatttcacttatttattaatttaatttaattttttttttttagctgaagtcttgctgttgcccaggctggagtgcagtggtgcgatctcagctcactgcaacctccgcctcctgggttcacaccattctcctgcctcagcctcccaagtaactgggactacaggcgcccgccaccacgcccggctaattttttgtatttttagtagggatggggtttcactgtgttagccaggatggtctcaatctcctgacctcatgatccgcctgccttggcctcccaaagtgctgggattacaggtgtgagccactgagcctggccctatttatttgttttttaaagagaccaggtcacgctgtgttgcctaggctgcgttagaactcctgggctcaagagatgctcctgcctcagcctccaaagtagccgcgatatagcacgtaccaccatgcctggctctctttcagttaactttaaagaaatctggtgtttttgtttttgttttttgagacagagtctcgctctgtcacccaggcaggagtgcagtggcactatctcagctcactgcaacctctgcctcctgggttcaaacaattcttgtgcctcagcgttctgattagctgggattacaggcgctctccaccatacccggctaatttttgtatttttagtagagacagggtttcgccatgttggccaggctagtctcaaactcctgacctcaagtgatccgcctgcctcagcctcccaaagtgttgggattacaggcctgagacactatgcccagccttcactgcttttatgcaaaggaataaatagagtgattattaaagtgctctggatcacacacatacaaacacacatatgcacatacatacacacacacaaaaatacacaaactttaggtaacataaatgtgtgtggctgtcagtgaatgctgcatttttctgagcttgtaaccttccctttactaactgtctccacattatgaccacctgaaaaatgctacactgcagtggtacattcttcagcccaactaggattggatcagaggagttactgggttgatagtcttggactgaagctctctaaagagcagaatttctgtgatgtgcaggtagcttactgttaccctgtaagctccattttttatatttctttgcccctccttctcaatattcacacagttttcacaggactgattcaagtgtgaagccaggatctcatcttttaacagagtggcattccgcacagtctgaggcatgatctctttgtgtctaggttgctccatttagcttcaaaggcagcatgatgatttatggtccatttgtattagggaagactcagaggagggctagaattgtgatggttggattaattcattttttccaggcgcaccctttcctccctattcttggttgttttgcagatatcccaagtaattccagattcatttggaaggtttctctctcagtagcctgctctctaggtagttctcaaattctaatagacgcacagacacaaaaatctgcttggtaggtggggtttttactttttagtgacttttatcttgtgtgcctgacctggtgcagcatctggaaaagtattggtagaaaagaatattctcagtgagaaggagaaggaacaagtaaaacaatgtgaactaaaggcctggcacagtggctcacgcctgtaatcccagcactttgggaggccaaggtaggagggtggcttgaaaccaggaattcgagaccagcctaggcaacagagcgagaccctgtctctacaaaaaaaaaaaaaaaaaaaaggcaaaaaaccccccagaattagccaggtgtggtggcacatgcctatagtcccagctactcgggaggctgaggcgggaggattgcttgagcccaggagtttgaggctgccatgagctatgatcacaccactgcactccagcataaaaagcttggttatttatcttagttaaagctgtccttaaagaatttataaatggttgcaaatatttctgaaaatcatagatgtatggtttctatggttcctggttactttatccagtaaagtaacatgacagcttattttatggatagtcactagattgtaaacctttggaagttgggactgttccattcatcatcttcacattccccactgtgcaaagcacagtttgctcatttgttttgtttcatttttttccctttcaactatagttttcacatgtaaaccatcaaattataagagattaaagataatttaggatttagggtgttttgattttctagctcataaaataaggatggaagagcagtgatcagttgtggtaattgactgttatggcagaaggcaaaaaggcacagagaaaagagatagaggacaagcctgttctggttggcatcccaagtctagatcctccatctgggagcccatggctcagataatactccaggtaatcatgaattgtgggagttaaccctgtttaatgccccacaaaggaacagacctgtaggaacaccttctcctgtctgctgctgccacagagggtagcaaatcccatgctaggcgtggagaggagacttgggcatgtccctggagggacactgctgcagtcacttcacttacagagctggggaggccctgaatggtgtcagagttcacagtgcaaagcagtaattatgttgaagaatgtgacatctcaagattcaacaagttttttttttttttttgccttaaacatgaatgcctattcatagagggattataggagcaaagctctcttagatattaaacaccctgatcagaagaaaaagagaagcaaattcctgatgtcaggaaatagcagcaaatttttacagaatgcttaagcctggcacagcaatcctaagaatgttgttcagtttcatggcttttcctctcatattgggctgaatgtaacttgtccttcatttatgtaacaaaatatttgagtgcttactgtgagctaagcactttctcagtgttgggagtaaagcaacaagcaaagcaaatccctaagctttggggagatggaaaataaatatctgataaagtatatggtagtcataagagctgggaggataggagatggagtagggtgatgggtgctgttggagataatatgtcagggaagggggggtgtttagtagagggctgaagtgagggagaaggtgttccaggtgagggcacaggtgtgaatgtagaccctaatgtggaagtgtgcttgggtgggtcaaggaagtgaaccctaagaggaccactgggcagaagtggaagagctaggatagggaggtggggctgagggtgaccaggggccaagccatgcagagcctcttaggtcctgagctttctcagtggtctccccttcatctgctttggagcttgctttcctatgtggcaacattagttctagtgtgatgaatattagtgggaaaatagaaagttctatataaaacttacttctggaaactaaaggattcttgcttagacctcagatgttgatgggtggtagattaaaggccgttttctcatttgttgagctgtgccctgagatgagttttctatattcgtgtggtagagaattcattgaaacttgaatacgtgccattatgtgaggcagaagtgtatattctatgaaagggtgttgacatattgtcacataccatgagctgcttaatctgggaatatttgtaaaagtgtcatctggtgtgaaggctgatatttaactatctttaaaaaatactggaaaagacaatttgcttgcagattttagggttttgctgtgggtctgtttttgtggaaatgatttgtgttcagtagcattttttcccctacagttttcatatggtactgttttgacttgtttggaagataatttgcttggcttaaagggaattattcgaacaatcttagaagtttaaaaaattatgttagctagaaatcagaagtttttgcctttactgaaaagttcattatttattcattaatttatccatccatttatacaacaaaaagtgattcagcatgtagcgtgtagcagacagtgtgctgaagatacagcagatgtaacagatatggcttgattagtcttgctaggcagcaagagacaaacatatgcatacacttccacactaattatggtaagggctaaaacttattgaaaacagtatagtgatagggaatttggagtggggtggggagctgtgtaggatagtcagatgagacttttttttttgagacagagtcttgctctgtcgccaggctttagtgcagtggcgcaatctcagctcactgcaatccccacctcctgggttcaagcaattcccctgcctcagcctccctagcagttgggactacaggcgcgcaccagctcgcccggctaattttttgtattttagtagagacggagtttcaccgtgttggccaggatggtgtcgatttcctgacctcgtgatccgcccacctcagcctcccaaaatgctgggattacaggcgtgagccactgcgctcggcctagatgagacatttttgagaaaataacatttaagatgaggcctgaaggaaaatagtgccagccatttgaagagtgagggaaaggggtttccaggcagattcaatatattgtgcaaaggccctgaggaagtgtgtggttttagtggagagctaaagaaccatgaggcaagagcatcgggatatccaagaagtcatgctggattacatatactggtcagtaaggagcttggatttgattttactggggaaataacataatctgatatgtttaaaatgattactgaggcttctaagtagagcattacactgttaacagtagtgggagtgagaggtcaggcttggtctagggcagtgcttctcaatgtgtggtctcaggatcagccctatcagaatgacctggaaacctgtaagaaatgcatacttcaagtcttattatggacttgctgattcagaacctggaggtgggactcagcaatctgctttaacaagtcctttggatgatctgatatacagaaaagtttgagaaccactggtctagggattgctggaggagatggtaagcagtagatggattctggtgtatgttttgaaggtagggatgataggacttttgtatatgggagctgaggaaaaaggagaaatcagaaatattattattattattaatgtttcaagacggaatcccactgtcacccaggctggagtgcagtggcatgatcttggctcactgcaacctgataaggaccttgtttattgtgatgagggagactggtgggggtagcaaaaggacataacttttgaacacattgcgtttggagtgttcatgaaatgtccaagtgaagatgttggctgttgatggcaaaatgagcgtacagtccagagggaagatgtagtttcaaatacagctcagcagaaagatacagtttccagaaaggaatttgggacttgccagtgtacagggagtatttaaagcaattgaaataggtgtgatatcaccaaggagagagatagcaaggagagagggtgcaagagcgggcaaaggaccaagctggaaggaactcttgacattcacaggagcaagagccagcaaaagaacagaaagaacggccagggagagaagagaagaaaaccaggaaactggtttcatggggaaatatttcaggaacagagtgatcaactgtgcttaatttgtatgatgaagcggagatttgtagcatagagatcactaggcattctatttggactgtcagtgaaattgaaataaaaagtcaagaatcaacttgatttccatcacaggttttagattagaagaaaccagagaaacacagccccaattttctatttgctagttttccaaacagtaagttttcattgatttcactggctcccctccggctactatttgctgtgcacaaacaaagtctgaatgagcattttgtagtcctgaaaaggagtagcatatgggcttcaacagccggtcatattttcttttattactatatttaaagcaacattcaagattaaaaaaaaattcctggcaactagcataacaagctgcaataaaatcattcctggctattgatatgggctactttgtgcctcatgtcatgttattgaatccaacttcttggaattgactgtcttaatctgtcacttagcaaatttatattggtgaggaagaacaaaaacagatttataacttgcatatctcttcaagcttctgttaatatgctcaatattagaatgttctacttttagcgttttgggtcataagctatagaacattggggcttggtgagaggatatgggcatggggagaggaatgaatatttggcattatttatgtttgaaccattgagctggggtctttaggtttattatttcatttaattcccactctgacgtaggtggtatttccctcattagtagataaggaaatgagctagtaaagaaaactatttaaatccagatctaaaatggatctttattctgtgccaagctcttgggggaagagtatgtgtggaggaggagttgtggggactcacagagcagtggcaaggcaagccagagatacagcaaagggatatcaaggactaatgaggtactttaaaggagatcgagtcatggtaaggcatttaaattagttttgttagcaagtactgcatggaacaggaagactctgtacatgctcagtgtagggcttggtccgtcaagactggctaggagttttctagatagagccttgaatcttgcattacagtcactacagagcatgagctctgtggacatttcatgaaaagcttcctttctacttggatatatttttttacttcttgtgtgcatacttgatttatttactgttccttatagagctgcaaggccttgtttcttttctatagaagttatatttctctgagttcagatgtcacatcttcgttaccttctctcaagttttgctatacaagcttaggaacgtcatctctttctcttccagagttatcttccatcatgtaggctttggagccactttcctcagagcctccatttgcctcacctcttcttgcctgggaccttgtaaaaacagtgattgtggtaattaaattgagatatgaggaatatatataactattatgtagtcataataattaaaaatttaaaaaaaatgcaatgagaggggaaaaaaatctcctggattggtgagctagacaaaacttcatgttaattaacatggatgctttaatccatctattcctgagtccaggacatcaaatcttgggttctacaatgggtgccagtcttaggagggtcatatgtatttccagtcacaaaagatctttctgtcatgttggagaagacaaaagtttataagaatcagtgggccatttaaaatgataatgagcaacttaggcgtaaagccagatgtcacaggctggtggcttgcagcctgctctactgtgctttaaatacgcagtatttaaaaaattgatgttggttcccaatatttataaattgggagatatcagccataaatctagattccatcctcccccacctttaaaaaaaagaaagttggatctgggaacactaggtctatgtttgtgcttagcaggaatcggaagagctgggttgtgaccaggctctttcttttagcagtggcaagctcttttcagctttctgccatcccgaaagcaccctagtgtttctcattggccgtgatgcccatgttgactgcaatttgtcattgtcctcaaggctgtcgttttttccacagagccggctttgctctttgacaaagctactttggcctccttatacatttgagttcattgatccttagcctaaatgatcaggacatgacacattcagaagtttgtattatcttgtaaaagcacatgagcaaagtctgtctagtaagtgacattgctggtattcagaccaggatatggctgagaggaagcacatatgtaaattgaatgcatcagggatcttttggagaagtcaaacaagaattctgattacctcatcagtgatacctaaatgcagatttcttcttgcttcagacaaaatttttcaaagatactcaaagtatctcagctcttgttgtatgtgtgttttgaaagatagggttgaagaaaacaatgaaaagataacagggatatctgtcctccagagttgttcaggggattcagcatatgagaagttatttgcgaagttttagttcccagtctgggcatcagctcattatcattagtctctgatatgagttgtttaatgatgaacttgtgcaaagcacttgatcctattcagcgtcagacattcattgttaaaagaacacattgaggacactgttgtaggtcaggaaattgaaggtagggagttgagggcaagtagaagagagtttcattctggagttagttcagtaaacattgaatgctcatgatgtgtcaggctttatgctgctaccagaggcaggaagataaataagacagaacatgcagacttgaacagtacggtgtggtaagaggtgtgcccatggtactgtgcgattatagactggcgttggcccagtgcagggctagagggatgctccatggtgatgactgagttgagccttaaggcccggatgagctggccaggtagtgatgacaagagggagagggatttaaagtgtgaagttcaatttaaggaacagagatgatgcaggaagggctaagatatggaaggctttgatgaagattttggggagccagggaagaaggggagagatgatcagatttccattttgattgcagcttggtaactggattacagtgtggcagaactggaggctgggagaccaggaaggtttcaaccaagttagaaaatcatttttggtttagaagacagtgaggggctgggtgtggtggctcatgcctgtaatcctagcactttctcaggctgaggcaggaggatcacttgagctcaggagttcgagaccagcctgggcaacatagtgagacgcacccccccgcccatctctattaaaaaaaaaaaaaaaagacagatgaggatgggatctggagtggcacaagccatgatttaccccctcattaggtgagatactttttggaagtgctgaccttttgccattttgaagaaccagcttttagatgctccattatggacttagattgaggaagattgatcaattttattattttgctgctttacattttcaagaggtttttttttttttttttttttgaggaggagggaggagaagggaacttactgtaatgtaattttgctaaaagtttcccagaagtgaatcatgtttatcaagataaattgtagaaagaagaaatttgtttgcttataatattgtttctatgggaaatcattcttcaacaacaagcagcaaacttcctgggaggaggcactcagtatattcttctgcccctgaggaagttgaggattgaagtatctcccttgcttgtactctgggactagttgactctaagcctccttccagcctcctgctgtcaaaacaacttttcttctgtttattttcatataggagctgcacaactcaaatgttatgtgttatgccaggacctcagtagcaggtgggggtgaaaagccctgcacagtatttactgggaaaggattgcctgttcctgaggcactgcctccatgatagacgctccactgatgctgcagcccatgataggctaaagagattttgtgggtactaagttctattaaaatttagttcaggctgtcatcgctgttctccaggaaacctcagtacccttttaattagccccacccaggctgtgacctcaccctgatccattgtctgtacagctgccagagtgattttctgaactgcacatccaagtgtatcattctcctacttaaaatccttcagcagttccccagagctaatccatgggagtgggaaggcaagaatctgagtctcttgcaggacccgtgaggcatccgtcccccaagggagccgaagttcagtccttcctattagatctctagaaagctacgtgactggaccccattattctacactccctgaagcccacttactttaatttttgatgcttgtctttggcttttacaaattgatatgagaagccaactgtgaagttcaggtccatgttgtttgttaaaggaatcataagtctgttttgcaattcaatgctttctttaaggacctatgaatacttgttaaatgaatagttcatattctaaattgcttttagcatttagtgccaggaaaaaagaacttttctcatttaaaaatcttgtgtgcttcgtttaaagaatcaattaaaataatagggtgtttggttttttaaaaacataaattttgtttttttagagatggggaggtggtctcactctgttgcccaggctggccttgaactcctggactccaagtgatcctctcgcctcagcctcctgaatcactaggactattgtgtatttgccttttgacttttgttgccaggagcctcaaatctaaagataggtcataatagtcataaaagtagtgatgaactggaaatctgctgtttttgtctttccagcctaggagccttttccccatttactcgtttgtttacaaatattttttgagtggttgtcatgtgctgggcactgagaaagctgtagtgaataagatgggtaggcaaaaatggaagtggttcgattgtgctcatccaggtatgagataatagtggcttgggtgagtgtttgcagtgaaggtgtagagaagtgggtgagttctgaatgtatttttaaggtagaagcaagtgaatttgctgatgatcaaaagtggggaatgagggaaaaagaagaatccaggacgattcccaggttttgattaggtatgtgatactgacttttgctgaaactgagggacatgttgaggaagaagggaaggacagctgaaaacatttgggaaatgttaatttgtaatacttgttacatatccaaatggagatgtcatttagttttccagagctcagggtagagattctgtctccattccatagcaccacccaccatgcaaacatgcatacacacacacacacacacacacacacacacgcgcacacacacacacacacttcttttagggaacttctcatgtccacagcaaccatgtgattctactatggtttcagcttcttcagccacaaaagacctgatacttccgtgcctgctggcctttgtgctatagtctcctggccacagtgattagtccagggggtggacatatgacccaagagtccttcattggggtctagggaaataccgccttgaagagagaggctctctttttctgctggagagactaaatggtttacactcagatgtgattcctgctacgtggaggaagtccatctgaatagtacagattgatgaccttgcccagaaaagcagagattctacagaaatgtggaaagtcccctccctgctgtttactacactgtatcccttggaatgccagcgcttaaaggtgttaagtgagtaaaacttctttggtcaaataaatttaaagaaagaaatttcttgacagcagaacttttcagatgagcctttgtaatgaatatgcggctgggcatagtggctcatgtctgttatcccagcactttgggaggctgaggtgggtggattgcttgaccccaggagttcgagaccagcctgggcaacatcacaagaccccttctctgcaaaaaatacaaaaaatacagaaaaatcagtgatgagtgcagctgtagtccctgctacttgggaggctgaggcaggggcatcgcttgagcctggaaggtcgaggctcctgtgagccaagattgtgccactgcgctccagcctgagtgacagagcaagacactgtgtaaataaataaaaatatgttttgtgcttctttaagaggaggattagtaaacagtgttccccaaatctatttgacagtggagggtttttttttgtttttaaatgggacatctataaatatctctcagttggaacccagcttgaaatattgcttgaaatgctataacaggttgtcatttttttgtagtcatagtggggatgggtgagttgttctttatttctggcaaaactggtaggctccatataactgtcattacttcctgatgttttatagcttgttaaggagacaaaagccttttttcttctcctagtattttaacatgttagtaccagatattatctatgcttaggtatgaattttggctcagagattttctcagcatcacaccaatgataagtttcatgatcctagaatgtactttccctgtattctttctcctctgctggtgttctgtgagtccacgtgtatgtgtgtgcaggacaacacttaaagtggttattctttcttcaaagactcagttcaacacacccctggtggctgttgtagctcagggttgagtagtgatcctggtattaaagatgagaaatttgttaggtagccgctatgagctgcaaggtttcctgaggcagaggtatccggaacagagtcagggaggccatggggccagaggccttcctgattctggacacacagagtaccttggtttccccaccctaccttaaaaatatattcggattcacttataccgattaattacttagagagagtgaatgtattatagttatgtgaacttgtactccctggctgtctctcttcttatgccttggtgatttgtctagaggataaattgctttttggcttttataaattctgttttcttctaccaactgctaaccattaacatctcaatcaaatgggggaatttgcagttatcagcttaactaatctccatgcccacatttcttgcttctctccctgttactgacccagatccttgatgataactcattgtagattttgttatcatttaaaaccttttcaactaggtacttgatataatagttcttattaatttttaattaattttatattatttagtcatttgctgagttggtagatatttatcttgtgatttcttttaaaaaagtcttagttctgagatgaacctttaacagcacccttctgtggcagtctactaagcacagtgttaacctgaggtctttggaaaggccagcttctcacagatctaagggatgcaatttgctggcaaatctttagttggccagtcttgactacatctgatcaaagttgggaagtgagctgctggagacggtgacattttctgaagcatgaacagtaacaatctgaaaccataggcccttcacacctcttctgtcatttcgtctttgctaccgtccttggaaatagcctgtctttacaaaggtttctatataggttaagatacttgcttgaggtcatgcaaataagagctagtctggaggaaaaactcagtttcctgtctcttctgttcatttcactgtcctgcatggggttatgcttttttctttcaatgaagcgtaggaagtctccttgggaatcatctgtgctgatctctgtgtgtgtgttttaaattgcaatttgtgttgcaactggtaattccagttcttgtatattactaaggctttctctgtagatggatagttaatccgtgaaaatcccgaaaagcatgcagctctgttgatttgattttgttataagataaggaatgcataatcactctgggttcctggctttaaattataaggatgtgttaaattatgaaaatgaaatgaggtttctaaaaattctatattctggaaaatgctattaagcaatttccattttgatgcaatgtatatttaaaaagatatattttctgtgtatagttgtactgtttttaatctccttgtgattttcctgaagctgtgcttaaatgtgaacaattgtttaaaataaaccaataaaggagagaaataggatgaagatattttacatgttttactaattctgacatgtccccaagtgataaatggtattcagaggctgtctgtacaagaagggttcttacagtccatttctagactaatttcagagaacgcagcacctgagtggccaggtgagctgtgctcactgtggggcggcagggtgggcgctaaagccttgagtccatgctcaatgcgctttcccctgccccgtgctggcatccagatttttgtttattgtctctagtttctacatcctttgtaggcaatgaaactcaccttatatggaattgtacgtgtcttttataggaagagtatgtgtgtctaagttaatcactcctggtgggatctctgtctgctctgttactgtgttggccattgttactgctctgttactgtgctggcccaatgaaatagtctctcggccatttgactacttcagtttaggccctagattgttttgcaacttgcttcctagttcatcccccttccacccatcttccatatttccaggagaaaaaaaataaaaataaaaactttaatgtctcccccaacccccagattttaggtactgttttctgccccctgtctcgctttctagctgtttctcctctcctgtttgcatgcacccttctcattctggctttaggaactacttgctgtcttgacagtgacaggtttcatccctccatgcttgtaggttgttgcaccatcctatgaccagaataccttcctctccccatttcagccattagtactcagcttctgtatgtgcttccctaggaagtccttccagtgacagactgtactctactcacctcccctgtgagcagcctaaggcagtatggtagcgaagagtgtgggctgtggtctcaggttgcctgggttcaaacccagctcctagctgtgtgacgttggacaagtcacttaacttctttgggcttcagctctcatctctaattaatagtatttaaggttgttttagggttaaatgacttaatggatgtaaatcattcatgaaagtgcacatacgaacatcctgttgctcacaatctagtattactagcttttaagcctggaaaaccagtatgattccatttttgtaccctcaggccccttttatagtacataggacatggtaggcactcaataaatgttgcttacttgaataaatgaaacaaaaaagtcaggaaacacagaacacttattttagtgtttgttaagttatgccctgctttgttccagaaaatgatttatttcaattagggtttcagatgtaccctttaaggagcaatgtatgtatctgtaaactttatattttcctcagagtcacaagccgtttggaatttcattttgaaattctctttccactaacatttatagttttggcacagttgccctttaaaaagacagcgtatcaattgaacataaatatattgtgtttaaactatatgcctgcttgaataagtgcagtacttatttgtcagggcatatattatgttggagtatgatgtcatgaggcttaaggaaactaatgcttatcatttgttagtgcttaaaacaaagtagagatagccaaatgcatttctctacttccttattgccatacagctctccttgtaagttaataagtatcttattgcaaatcagccctgtatctgttccaaattcaaatgttgatggttgagcttccagtattttctcccatatattcacactgaataacatttcctgaggattgcataagacccatttaacatttgtgaactatgagacttctttgtacatttctgtttctttagttgtattacggtaatcgggcatatgtcttctaaccttgatgatctcacctctatataatataaggatgttgggagaaatatgaaatctagaccaactctaaaaaattgaatgtcaaggtaattgtcttgtcacacaatggtgtaaccagccaacatcctcgaacagatccgtgtccataatggcatcattgacttctgaactgtatggtggtgttctctgaaaggtgctatagagaaaacacaagtgtgaagggcgattgtgatggttgtgggtcagaggctcctcaagtggagtgaatgaggccagccaggaatgaagacaatgcagtgaatgattcttttgttgcatagtaaaatgaagtactagaaaatgttctcttaacaaagaatcatgtttggtcagagtggacgtgatatagtgaggagtttttgtaaattcttcatttagcgactaatattttggctcagttaaagatatgaaaaacattttttaacaaaaaggtgttagtggccgggcatggtgggctcactcctgtaatctggctttaggaactaactagctggttctgactagcgtatgagggtggggttaggttttccctatcttcccccttcttccatagcactttgtgaggctgaggcgggtggaccacctgaggtcgggggttcaagaccagcctggccaacatggcgaaaccccgtctctaccgaaaatacaaaaattagccaggcgtggtggcgcatgcctataatcccagctactcgagaggctgagtcaggagaatcgcttgaacccaggagtcagaggttacagtgagccgagattgcaccactgcactccagcctgggcaacagagcaagactctgtctcaaaaaaaaaaaaataaaataaaaggtggtagtataaaaaaaggggcactgtattttatagttacaaatactgagtcattaatgttacaggcgtacaatgctccacttgctatgagagtgtgctgctaagctctgtctccagaacttttgccccttggtagactctgtcttgcacaggtttcttgtcagatcatagtcctcattttctgtgcataagatggaaatagcatgcagattataccacagattgtcctagtagttcttttatatgttttactcaaaaaagctggtcctacttttttttttttttttatttcttgactagttttgttaggagaatttacacttttggtagtagttttgccattatgtcattacttatgaacaaatgtagttattgcacttactttatagagccagctcagaaaatttgatttcaatgaaattctttgtgtttagcacttttccaataagtgggccattgattcggttataacaaactattttgatgaatgagttgttctgtttatggaaggattttacacttaaatgttgcttcttgggttgtgctatttttgtactttgaaagttacataaaatgaaaagaaccagcacataagttttatatgctgagagttgaagggtgatcccattgtttctgaatttgagtctctgccagcatgaatcctcctatgagggtccctaaaggctatattatagtttcgatgaaatgtatacattctatgaatgaaaaaaatatagaatttccttttcatgattttttttcttagtttgttcccatttttgtccccatcaatataaaataaattaaaatgaccacaacaaactcaaggaggtgaaaatcaagaaattgttacctgtattatggacaggtggtgtagcgtcacctctctcatacacacccactatctccaataagcctagcctgggaaggagaatattttcctgttagctatttgagtcctcttgcgaagtcatttgaatatgtgagttctggacattgcagataactagttggttctgactagcgtatgaggttgggattagattttccctattttctctcttcttccatagtgagatttgtggagggtcaattagagtcttccttgacacaaggttatttctttaatgtagcacaggggaaggacatctttttccttttatgaattctgcccaatccttttctgggctgatctttgattcctatcatggggtctgtccagttttcagtattcttccttgtttgggtattcaggtagtagatatctcagatattcttccttgagtacaaaagtatctcccagcagtgtggccttaggcagatttgtggtctttttggctgtgctgtccagtactggaaaggataccagatagaagcttcagttctcagcagggtcaggttgcctctggctgggcagtgggtgtccagatgcagggatagtggtgtagatgcagggcagtgattaaaggctttggagtttgaatcccaaccctgctcagtgtgaccttgggcaagttacttacctgtgttaagcctcaataacctgtgccattggggcctttataaagattaatgaggtgtaatataaaatacttcacatagtcattttctggcacatactcagtacgtggtggaggttatggtgattttattaaaatagaattggctgtagatgcccctccccactttccaagatcccaacatcatgcctagtctgcctgcattgttgtcgagcatgaagaaataatcgattttgtaatttattcggctccttattacttttccattcttgcagatccattgcccatatccttaagatgttttctttaagccttaccctagtcagagactattttctaaatagaactaaaagagaaatttgattgagcatctgaatctgaccttctccccaattaacccagttgggcagaccttcatttagagtgtcatttatttttcaagccacgtggtaaggaagcagagggttctccttacttctaaagtcaatttccattaaaaccttcagtgttcagtgtgtagcttaatgccttttaaaatgattgctatttttgaaccagtgtttttgtcacaacgttttgagtgtagaatattccttatttgacaaccctgagcttgtaggagtttataaatggctaagaacaatctgattagaatgtattgcttttggttggaggccaagaatattggatcattggtttagggtatgacacttaaagagaccaaagagcagagtacataatgcccagataggccaattcatgtagctttgttccataatgtaagattgaaccccaaaccctggccacctatctttgagatatatgctgttggccacaggagcattaattactccgggcagatcagcagaccatgaactacatgctacgaggggaaatccaaatgcctcaatgtacaggatagtgggtcagtagaagaaacctcacaaaggaaagctggagaaggctgtcaatgaaggtttttttttttttttttttttttttttaagtcgtgtaagaattgctaagtgacagatcagagtccagaagacaggaaaggagttaggaaattctgagatatttaaattctgaccatgtaataaatgattcccttgtggaagataaggggtaagtaccaaaaggaaggagtgtcacaatgtggcagttttctaatgaacttaggtcttaaaaggaagcacacacaagatagaaggctcacaatcaggagggactggcagtgatcttagctcatgttaatatactgtgtgtcaggcagtgttctaagcactcacatccttgtttgatctcatgataaccttatgaagtagatggtattattattgcccttttacagaggcgtaaacgggaggctttgggcgtttaggtatttgctgtcatttacatagctagttaagtaactgcgctgggatttaagttgaggtagtcagattccagagagatctgagacttgcagaaggtgccagagacaataaaaaaaagtagttgaaagaagtgttcagagtcataaggaaagaatatatttgcatctgagtggaactgatggtggctgtgggtagtcatagagcatagccttttaactcctgttgtctatctatcttttatatatagaaaactcagaatgccggctgagcatggtggctcatgcctataatcccagcactttgggaggctgaggcgggtggatcacctgaggtcaggagttcaagaccagccaggccaacatggtgaaacacagtctctactaaaaatacaaaaattagcgtggtgcacacgcctgtagtcccagctacttgggagggtgaagcaggagaatcacttgaacctgcagggcagaggttgcagtgagctgagattgtgccgctgctccagcctgggcaatagagcgagactctgtctcaaaacaacagcaacaacaacagaaaactcagaatgtcaaaaatatgttggagaagtaataagacagacatagtttttctaactgaatttaagcctcttagcccgacagaatttctccacagggttctgagaacattttggatccagattgttcaaccaagtccatgatgatctgtgaggaagcatggagaacagaaataacactggaaaggcggaggagggggcacaggtgcactttggtgcggaaaagtttgggaagcattgtttgaaagaagttgatatctttaaatattcagggctagttgctagcaacttactatggctagttgttgaaagctgcagtgagtctgttcattagctagtgggcagcccacatttagaagaatgtaggtgtgagatgggagagactttggcataagaatggttcagatggaatgggaacaccagggggtgattcgatcattaagctttcctctgagaatgtgatttggtatctttgaaactaggccagagatttatttggatctttggttttccatttgtgaagaggtcatttagtctcatttccagatgaagaaatttgggttcagagaggatgggagtgactttccctaagccactgagctgtttggtgaccaaggcaggctggatgctcacctgctttctcgctgctctcttcttactgcagctcacctgtggacttgtggactgggccatcaggagtctctaggaggcagcattgattttgggataggcctacctgggttcaaatcccagctctgacacttaatctgtaacagtgttacattattctgaggattagtgaaaagggaacacttagcatataggaagggctaagtgtatgttcttgcctctttctagttaggcttgaaatctttctttattttatgtacttattattactaagttttctagcacctcccaactcatgaccaaaaagtttcattttcatcttatttttctctttggatgatttttataagggtatttcttatagtttctctatatttaaatactttatactgtctagggtatttaggcaaaggattcaactacagggcttttagaaatcctttccagctctaaaattataggatttaattgtttttgaaaaagatgccttctaccttcctcctcctccagctgcacacgtagtttactggttactgtggtaactgcactctaataatcctgtcaggaaatctgatgcaactatctgtctaatcttattttccagacacaaaacaagcacacggcttccttctaagaatccttctaaagcgctccagcctaagcattgtttcttcttgttctgatgttttttaagattgcacttagagaagaatgcacctcattgggtgtttcctcaatgtggaatgttttatagtatccagtgaccagtgcatcactctaaagcggtgtgtgttttcatgcactctcctggagttgatgaaattttgggtagtttgaattataattttaaaaaatgcagaatagggattagagaggatttaaatttattttgcacatagaggattgaacgtaattactcagagagttagctaaaatcagtatttttgcttttttttttttttttggacaagccagttttacaaaatgtccctctgctgatccatgaacaagggataagtctgtaccttttcatcctccctcccttcttcagccattcaccttccttagtaggggtcaagtgggatccctgtgatgctactcctggcaaggaacctctgtactcccagcctctccaccaatctctacttgaccctcagaagcaatctcatcacacgtcttattcccgtttatgtcagtcaccataggaagcctggactcccgtgtcatctctcactcctgtgtcctgatcctcatttgcctctttacttcagcttttccaatcctgcttccctcccctagggaactcatgaagccccttcactgtgcagtttgtgtgctcaccatcagtcatcagcaaaccccccacttcctcaccttgtctgggagcatgaccttcatctccttgctttattggacacttgggtctctcctggcagtactgcccctccttcagctgtctcaagtggccaccctttttcatctttcccgtacaccatgggtagagctggggtagcctcgtctatgctattttcatagtgctgctcctccttctcctgaaacgccacctcctctgactttcaggtctctgcatggcccactttgcctccttgtcactagtcctctgctcttccacgtggtcattcccctctttctttgaaaaattttgtttctggttcactgtccctgtctccaacactacttctgtgagttctccaggatttcagtccccatgttcactccatcccacggtcatatcttgatcctctcatcaccggtgacttcagtgcctccatcactcactttgaaacatcccactcttatcaccacttcctcttctctcgcaagcctcatgtggtacctccaacctcaatagtccattgatccaccaggtttttcagtccattgaatccatcacgtcttcacggacccacactcaccccatgtcctcacttctccccttccccagcttggagtccacgatcaaccactgtaatctctaccatggcatagatccttatcacccttgacccctcaggcttggtcattcttgcttgactaaatcacagttctggttaaatccttccctctcttcacctgttctgtgcttgcacccatgaggccaaatgtgcttggagaataccacagcaccatattgtttgtctcactctaagctgatcacagatcttaagtgggcccttgatgctacctggcagtctcattgtgtttccactgtctcttcattcccaccactctctcagacaactgttgcatactttctacttgctgttcaaacatccatggtctccttacacttggttgtttcctttttcaccagaaaccccagaaataatcagtagagactgccaccagcacacccaccacctgcctgcgtctgtgcccatgctcccacctccttgggcatgatgttctatctccatctacacgtaccttctcaaggacattgctgtatgaaattttccctccctttcctatgtcatctattttcttctttctacctgattcccactggcatatgagttattatttttcttattaaataaaaacatcctctcttgactctgatttctcttccagctactagccagtttcttttcttgcttttactgcagaacgtttgaatgagtcatctgtatgcattaggtctaacatctcccctcccattctatcctgagcccatcacagtcaagtttgcaccttaactcaccgtacttcactggcattgtgcttttcggggccacgggtagcatttccttgccgaagcccatggtcaggacccactcccttcttacttcatttaccagcagcatttaacagtcagtaagtcccctccatgaaatacattctttacaggactgcttggacacacatgcacctcatttttttggttttcctggtctttctcagtctcctttgctaattccttatcgctccaaactctaagcaaagtgtttcagggtacttgttcctcatcgtgtctactctcagtgctttaaatatcacctgtaagatgacttctgcattcgtatttgtagcctggatctctctcttgaactccagaccccttcatctggctgcctgctggacatctctcctgggatgcgtctaacaggcatttcaaaacataacatgcccaatctccaatctgcttcctccacagtcattcccatctcagttaatagcatcctgctcttccacttacttaagagaagacatttggtgtcattcttttcttttatttcttttttgagacagagtctccctctgttgcccaggcttgagtgcagtggcgtgatttccgctcactgcaacctccacctcccaggttcatgcagttattgtgcctcagcctcctgagtagctgggcttacaggtgcctgccaccacgcccaactaatttttgtatttttagtagagatggggtttcgccatgttggctaggctggtctcaaactcctgacctcaagtgatctgaccaccttggtctcccaaagtgctgggattacaggtgtgagccactgcgcccagtctggtgtcattcttgatttctctttctcacataccccatcagcaaatcctataggctctatcttcaaaacgtatccagagttgatttcttatcacctttattgctatcaccctggtctaagctgccataatttttcacctggattaggagagtatctttctaactggtctttcagcttccagccttatccccttcagtctgttatcagctgtgtgcagattacgtcactcttcttcccatctcattcagagtaaaactgaagtgtttaccgtgactgacaagctgtggtgtgccctagccctccattaccctctggcttcatctcccacttcccgcccacttgcttccttgtttccccctctggtcttgctgtttcttgaaacagtccaggcctgagtctacctcagagctttttgcatttgttcttccctctgcctggaattcccttcagcttcctgtcctttatccatgtcctcatgatcccttatcccactccctcacttccttcaggtctttcttcaaatgtcactttttcagtgaggacttccctggccaccaatcttaactttccacacccctcctgacactttctgtctcctttgcctaatttattattctagtatttagcataatctaatagagtatatgttttgttgatttatcttattccttgtctcttttctctcctactggagtgtaagttccacaaggccagggacctttgttttgctcattgcttattcctggggactagggcgtagtttgtgtcatggtagggtgtcataagtatttgtttaagagaaaaataactatttctggctctaggcacattttggcttaaagtcactgtaaatctgcttgccacaatgcactaataaagctaattattttatttcatgttccctcttaaagtatatttattacaggtgtcaaattaatttaaaagcataatattaggcatgagagaatacaaatagagaagagttcctgcagcttttcatgctgctttaagtgagtcccattcatggtacagttctctctacatgcatttagaaatatgtcagcttatttatttaaatgtatcttgccttattagaaaaacaaaaaagatttaagggggctgtttggaaatgtgatgatgtaaggatggggcaacttaacatgctgtttcaaatgtttagaccgtacattattgatgtcaataatctcctctctaagaggcactgatatctgtctattgtgcagtttgcagcattccatgccaaagcttttgtatttattacttcagttctacctctcttgtttgggaaataatatctccagtcctctaaatgtaagctaatttatattataggcaaaaagcaattgaatggcagtttctcaaagtcaagttaatcacaactacctaaatttagccatgtgatattttaccaacagcccattgatctcctgccccactggctattgcatgtaactataaagcaaaggacagaacccaggcttgtgcactctggtttttctcttagtattttctggtttcccttagtgtcatagttaaccagagtgaagaagattcagagcaattcatatttctgcttcctagtaagttttcaaaaacatttcatttaaagaaatactgtgaaattaacatttttgagtggggtatggttctttgaatttttgaaagatcattttacttggaaattattttagatatatgaaagaatggcaaaggtagtttagaaagttcccatataccctttactcagctttccctaatgttaacatcttatttaactgtagtaaatggattaaaactgagaaatcaacagtaatacaatactattaactaaactgcagactttatgtagatttttaccagtttgtccactaatgtcctttttccatttcaggttctcatccaggatatcatgttttacttattcatttgtcttttagtcttacaatcagtagtagcaccactttcaaacttacatggatagagaaaggaggttaagttaatgctgtggtgaagtcatgagagtgtacagtaagtcctcacttaatgtcatcgatagggtcttggaagctgtgactttaagtgaaacatcatgtaaagaaaccagtttggccacaggctcattgatataaacaacaattaagttcctactgcagatttctagttacaaaagatcatcaaacttctatacaaacacttaaagcacttcttttctttttttttgagatggagtctcactctagggtggagtgcaatggtgcgatcttggcccactgcaacctccgcctcccgggttcaatcgattctcctgcctcagtctcccgagtagctgggattacaggcatgcgccaccacagccggctaattttgtatttttagtagagatggggtttcaccatgttgggcaggctggtctcgaactcctggcctctggtgatccaccctcctcggcctcccaaagtgttgggattacaggcgtgagccactgtgccttgctgttaaacgcgcttctaatcttaaacatagaaataaatgtgagttatacacacatttaagaaagagcaataggctgggcgtgatggctcacgcctgtaatctgagcactttgggaggccgagctgggcggatcacgaggtcaggagatccagaccatcctggccaacatggtgaaaccccatctctactaaaaatacaaaaattagctgggcgtggctgcgtgtgcctgtaatcccagctattcaggaggctgaggcaggagaatcacttgaactcgggaggcagaggttgcagtgagccgagatcgtgcctctgcactccagcctggtgacagagctagactctgtcttaaaaaaataaaaaataaaaataaaaaaatgaaaacaagataattatccaatttttggtgaatcagtgagtgatagcagtcatcttggtgatgggttaaatcaaggagtaaatgtttgcaaagtgaaaattgtagagtcctccctaccatcacgcgttttaaaaacaaatatagtgagcttgctgagtgcttttgtacctcatctttattgttatgtatttgtatgattattgtctacttggtgaatttaaatttgacagtaatttgtattaattccttccttccttcattcatttttcaacttgcttgctttagttcagggttgaaggtggctggagcgtatcctggcaggcagggcgcaaggtgggaaccaactctggacagggctccattccactgcagggtgcacatacacatgcacacacgcattctctcaatcagactgggacagttaggcatgccagtgaacctaatgtgcatggctttgcaatgtaggaggaaacagaaacctggaaaaactcactcagacatggcgaaaacatgcaaactctacaccagacagtggtcccagtcaggaattgatttctttttcttctcatcagtgttattaaccaaatgaaatgacattattcacggacctgctgtataggtttaaggcagatagactgttgggactgggagacattctgatccaggggctacagacgggtggccctgtggggctcatatactgttggaaatgtgatttgaatttgccaaaatttaatgactaaaaggttttccagaaaaatttatgtttgtggcttctctttaaaagattggtagttcccactgcctgaggcctgtgtttaccaccagggatgatcacatggccctgaggcggcccttcaccatgggcaaggatcccaccctcccaatactgccctgatctaaaccagtcccctcattttttttttttttttttttttgagatggagtcttgttctgtggccaggctggagtacagtggtacaatttcggctcactgcaacctccaactccctggttcaagctattctcctgcctcaggctcccgagtagctgggattacaggcacatgccaccacgcccagctaatttttgtaattttagtagagatggggtttcaccatgttggccaagatggtctcgatctcctgacctcgtgatccgcccgccttagcctcctaaagtgctgggattacaggtgtgagccaccacgtccagcctccaccagccccctcatttgataaatggaaatgcctcgggggaccagcacagtggcagaaagccacctcgccttgtctggcctttgtctgctcctctcggtctaagagagagctgggcaggcatggttttggcttctttgggcagcaaagatgatagctgaaagaggatgcagtattaactcccctccaggtctaggcctattcttagtatttttgcttgtgtccctcaaatactagagtttgcagactggtgcccggggctgcatttgctttgtagtcccttcctgtttacctgtatgtggttatctaaagtcttatagttactaatggtaaaaatcaagtgataagcctgaaaatccagatttgtgacttattttgataaatcagatgacctgcagcactggggccaccgtctcaccaggcatgggctcctgggctggggtcaaggctgcctcctcagatgggcacaggctcatttggccctttattctcgtttttggggcccgcctgggttcctgtgggcatttgagtttgcagtgtttgcctcaagttattaggttgaaaatcagagaagccccagtagtttcctgtttgtgtttcttgataatagttattcttgacaaggagttattgaagtaattcctttaaagttcttgaggagagagggaatttggaacagggacttgtaatagaatctgagatgaggtttgccaaaagtcagccatctgatttttgtcttctgtgcccctactggctctccctggatgtgctgtcagttcccttcatgtaacctaaggtttaatgatagacagatattagcttagagtattcccccttttggggcatttttgtttaaacacaacttgaagcacagtatatttaaagaattgagtgtaagctaccatggtggaatttcaggcattcattggatggtatccctgtaatttcatcccagaagtgtgtaagcatagaaacgagagtagagcactccctctttggatcattatagaaacatggaagagattattaaaggggtgttgtatgtatgtgtaactcttaagggtctagatctttgtggccctctatggtagctgctagtcacatatggccaccgagcacttgaaatatgctagtctacattgagatgtgctgtgagtataaaatacactctagatttcaaagacctactgtgaaacaaaggatgtaaaatgtctcattaataattttttatattgattacatgcttaaaggataatgttttggatatatgaggttaaataaaatattattaaaggtactttcatctttttaaaatatgtggctacaagaaaatttaaacttccacacacagcacatattctgtttctattggacagagctgctctagattctgctgtatttgatggtaagaaagggtgagcagcctgttgtctagatcttggtaaaccaaagtacaaagaacaaatgtggagagactgaaaatcgtaaattgttttcacacctcttgcctttaataaagtttattcttaactgctcactttacggtttttggtgcatttagttggatgcgaggttgccttttcacttccttcattgtattcatggtgtggcagtgttacacaatggttcagaacaagggacttgaagtcaaacagttgctacttggaattccagcccagctacttgaccttgggtcaattattttaacctccctgagcctcgttgtcctcctctataaataatggacgatgatgatgcaccccagtgaatgacgattgtggaaaataacatatgtaaagtgcccagtgttatgattattattcctgacaatatgaaaaaaaaaatcttattcagcacttctctgtgctaggagttaagtctgcccccaaaatcaggaaacggctcctttttgcttctgtggtgtgatactgggtctatcagaaaccatttaaaataaatagattttttttctattcactagtttcatggcataggtttttattgtatcagtctctttttgttcctgatgttcaatatttatcaaaacccagcaaggactaaatgtttaagaaaacgtttggcaccttgaattctcacagaagttgaaaacatgtattggatacagtaaaaaaaaaaaaaaaagtattcatctataggtgactacataaatgaccccagataacaggaactggacaatggaggatgggagcagtcacaaaaaccatgccatggggaccatcaacctggtcatcttgctctttctctttgtggttttcaggtacttgtaggatactttttttttttttttgaggtgaggctaaacttttattatgtgtcttccagcttttattatgtgctgtggaacttattaaacttaatatatgactaatgtatataactcaggggaacgtctgtgtaagttaactactagagaaaccttgacaggaaaaatatgaagatagttttgagtggactttatcattctcccttgatcataaaagaattgagacttggaagctgggaacttgggactcagaaggcccactggtggcctgctaacatgtaagagtgcacagattggtaaatgttttttaaagcttatttattttctctgtgtctatgaaagacactacgggtgtcattctctgcttcacactcatgtctcttgtactaaatagaaggcaagtcttatatttcccacttcctgctactttgcttggcagtgacttttcaaataattaaaaaaactgtcttgctggagtagctctctcttacccatggacagtcttgttatatccaaatcagtcagatagtatatgtaagaatgctttgtgagctaaagtcacttaataactacagtcttattactaacctgaccatggctgctggccatgaagctcacttgatttcatccacaggttccagtcaacccctcctgccactacctgttgtaggtgtggatggtgtttctgtgtgtcttctcctgccgccctgcctggatctcagctgctatcttttggccatcacaagcctggctttacccaccaactgtaggtcctggctgtcctgctcaggatatgacagctgctctctagtaagaattctctgattcctgatagatgacccctcttcgtaaattatgattatcttaaataatatgatatctataattgtaataatagaagctaacaactgattgcttactgtgtgctagatgctcttgtaattgatttgttctcttttgagtctcaacaatcctaggagagatgtgttattatccctattattcagatgataaaactgaggtgcagacagggtaaatgctgtcccaaagtctcagattagaacccaggtctatcagagtaggtcttgaggttttaacagtgcttgttttctgatctttgtttatgttgttttcctgatctcttgccatgtgtctaaatatttctagtcttcaaacacaagttctacctctgaagtgacattttcattaaggactctaggctgcatgttatgtgctcttatccccattgctctgagccagctgaaggatgtcttgcttgtctctatggcttagctagccttttataatgtatttttttctgattgtttcttgtgcatcaatcttgattttccaaattttattgttagtacttctaagatgagggcactttgtacgtttctcttagattcttcaacatacttagcatggtagtgagtaagctcattaagaaaaatttatgaactagacatttaagaaacagacatagagaatttgctactgacagtgtctattggctgaccctgtaccattcactacccttttcattttagcttctggagggattagtctaagagtgcttctccgttagaagaagttttgccctgcaggggacatttggcagtgtctagagacagatattttggattttcacaactaggaatggggtgctactggcatctatggggtagaggccagggattctgataatgcacagataaaaatagataatccacagataagaatattgtctggttccaaatgttgatagtgccaaggctgagaaactctggactagaggtagcaatatgatatgttctggtcaattaaatataagtggaagggtctgctgtggctttcttttcttttttgggacagtattttgtctgtcacctaggctagggtgcagtgatgtgatcatagctcactgcagcctgcagttcctggactcaagtgatcctcctgcctcagcttccgagtagctgggactatagttgcgtagcaccacacttgactaattaaatttttttttttttttttttttttttttttgtggagacagggccttgctatattgcccaacatggtcttgaactcctggcctcaagtgatcctccctccttggcttcccaaagtgctgggattacaggagtgagccaccgtacttgccctgctgtggctttctaggaaaattatgcttccatgagagaggattgccccttcatgttttcagcttcttctgctttcaacatgagcttgaacctggaggtagaatatccatgcatcttgtgaccaagagggaacaaacatgaagataaaagtcagcatgctaagggtggtgaagtgaaaagataaaaaatgtttgagttttcttttacttgtaaccaaacacattcctgagctaatagaccacagaaacttgagttgggaaggaattaagcccagcctgacctcatcgaagacttttccaacgtttctggtgacataatccactgctttgggagggagtctaattttgttgcagatctatatccattccaacagttctctcttacagtgagtgaaatttgacccccaaaacttctgcttatagacccagtgtgatgctgacctgagagtcacctggacagtcactcccacactttcatagatgtcagtgaaaagtcatcctgatcaagctggcgagtctactgacagagaccctcttccaaatattctggagggatgtacatctagaatgtaataccctctccttgggtagctctttagagccacagtccaaaggtgaggccattaataaaataaaaagatgtgacctctgggacccccaagccctttggtttcctacataggactttagagtcaacataaatatactagaagcttctgatattataaccacatgaatgagccaagaaggaactctcagtggcttgactgcccttaatctttcctctatgtcttgggctagacaccaggaatactactttcctcctgattacctttattttcaatccagtttacaaataactaagtgcctcaaaacccctcagagtaaggacaggtggctcatgtctgtaatcccagcactttgggaggctgaggctggaggatcgctttaggccaggagtttaagactagcctgggaaacatagggagactctgtctttatgaaaaaagaaaaaaaattaattgggtgtggtggtgtgcacctgctactgcgtagcagtccagagtagttgcgtagtcccagctactctggaggttgaggcgggaggatcacttgaacccagcaatttaaggctgcagtgagttatgatcgcaccactgcaacccagcctgggtgacagagcaagaccctgtttggaaaaagaaaaataaacaaccaaccaaccaaagaaacctctcagaataaatgcctgagagctgtttctgctaaatatctttcaatttaaaattttttaattctggtaaaaagagaaaaccacatgaaatttgtcatcttaaccatttttaattgtgcagttcagtaaagtatattgacattactgtgccacagatctctggaacttttccgtcttgtctgctgactatcttttatggcagtgtagggtgagccatgtctttacacagttgttcattcactgcttgccctgctacttacactcctcctgcaaaatgcccctagcttatagtacaagaaagaggtttctttggctggactttcctccttctaagacttcttttttttttttttttttgagacggagtttcgctctgtcgcccaggccggactgcggactgcagtggcacaatctcggctcactgcaagctccgcttcccgggttcacgccattctcctgcctcagcctcccgagtagctgggactacaggctcccgccactgcgcccggctaattttttgtatttttagtagagacagggtttcaccttgttagccaggatggtctcgatctcctgacctcatgatccacccgcctcggcctcccaaagtgctgggattacaggcgtgagccaccgcgcccggtcctccttctaagacttctgtgtcagccattcagtgagtttgctcaagtcctcttacagtccttaccatttcattagttgaatgcttaagtagaaatgggtttaaaaaaccagagatttggtttaaagagagggaatatctgggagcagcaaggattctaggtgggtagggtgtaaacctcaccaagtaactcagctgaaaatactttctcaatttagtacaaggtcccagcacggaaagatgtacaaggttatttttcctggcgcttctcccttccgtatagcccatatgttagtgcccttagttcttaatgccctctggcagccaagttcttatcttggggagctacatcacaggtgttgggtgctgtttaattttcagctaattgagcttttttgctgctagagtcttgtatggtgttttcttgaattcatgaattagtcattaatttgtgtttagcaggcaggcaccctggcagtctgtggtctgtccagcagaccttcttttggactggacggatgctctttgtgcagtttttagtgaatgatggtgggaaaaacagaatcctcttccagaacccttaaacggcagccttttctttacttccagctcttaccttgcaggtgggtgtgggtcttaacttcagaatggctacttttagtggggttaactattggggtaggatggagactgtgttctgaggctcagcagaagtcattgtgttttttttttttttttggcactctgtaaggtttgaggaaattctgtgatttgaatgaattttttctcaggaggatttacttctaaaataaacgtaattaattagataactggaatttcctaccacttagatggttgttgtcaggttctgtttccttgctacaatttgaaagcacttgaaatttcagattcatgaatttataccacaaaaactcaaaacagttgaaaagtacatagatgctcatgcctgtaagcccagcactttgggaggccgagatgggcagatcacttgaggccgggagttcgagaccaccctggccaacatggcaaaacctcatctctagtaaaaatgcaaaaaaattagccggatgtgttggtacatgcttgtaatctcagctacttggaaggttcaggcatgagaatcacttgaacctgggaagcagaggttgcagtgaaccaagattgtgccactgcactctagcctaggggacagagtgaaattttgtgtcaaaaagaaaacaaaaataaaaaaacacatttttttgagtgttatggagttatgattccaattctttaattttaataagccttgaaaagctgcagtttactccatcatgagtagggataagcttctcagtataaacaacctgtagttctgtggttaatgaaataagaagcttgaactactttcttaagttaaaagtgccttttcagcaagtagatgctcaatgaagttagcacacctatttcaactttaatcaataaggtggaaataatgcagtatggcaggtacattactttcagttgcattttctaggtgtgattatctcagagtttgaaatcgtacattttatgattttatgttagtgcaggatgaatcttttcagttataactgagctggctgtgagcatttagcctgacaggttgggctgcttttcttactggttttgtccgtataaggagtaccacagaagtacctcacacgcattttaaaataacttttcggtaataaaaattaatattggttaagaataaacttagcttatctaatgcgtgggccaaccatttctgagcaaaattgtgagcagagtttgtcttgtgtgttggctgtggtcttaaaaacactagcagacagtgttatgttgactgtaatatttcttctgtagagtaaaagatagatttcatttctgggtgaagcattgtaattggcttatacttttgtttctggtcatattatgtagacagtagaaaagaagtgggaatataaaggtaggagaggtattacttgaatgtgacgcataaaaagtatataagtagacagaaaagaagtgggaatatacaggtaggagaagcattacttttatgtgatgcataaaaaatatatagagttttctattgttttgggggtggggttagaaaacatgctatagataaagaagagtcaaaattagaaaattaagtaagatgtttcctgttatacttaaacattgcaatacttacaaagcatatcataaggtatatataaagtggtcattatgaactttctttacccaggtcaagcaacgcctctaagggggaaaaataatttggtgaatccccatactctatgatagggcatatagagccattttattataaagaagtgatatattgctgaagtgagtactaagtagcaagcagtggaaatgtgtaccatgcatttctgagaaataatgcctgggaatgcactgcaaaacaggtgtacttggtgtatatgcaatttaagtaacataacaacttgagaaggattcaaagatgggaatagctatcatgtgaatgaaggcattgcactgtagaaatatcttactataacaattttattatatgatcattgtggccaagaatactgatcatttagcttagttttagaagctaaatatgaagtatcatcattctatgtacaatgtattctgtggtggttgtgcatttattattgggatcacagcgtgtcttttttctgccaagatggacactgggcaccatggtcacaggcttcttgggtgctactaatagaaggctctctcttggctttctctgttgggcagaagtctgtgaatgccattatagctaagactctcccattctggccaggaaaggaagctggaaggacttggactcactgatttgtgctgacacccattcagccctgccgttggaactctttaatgtgcttttcagtgagctagtgtttcagaacctcatgacagggcaggctgatttctcagatgcatacttctctgacctctggcttcccctagctcactgaggctcgttctgcctgttgatgaggctctcctggcagatttgacactggacccaagagggcagaagaatcagctgttaagctggtacagggctcaaagataaataagaagacactcagcagagcgtaactttgaggcaggcacacaaccacttgggtcagtgtagtatttggggcatgtgggtttgtgtttggaatttgagaggaagcactctgatgatccagcagcctttgtgctccagtgacatgctaatttttttttcctgatattgggattgcgttcccttgactattgcagcagagaaactgaaatgggaatcatttcctgtgggtgcactgatgtgcacagtgggcggaaccgggaaggcaagtcagaggcatttttctcatttctgaatccatgagtctggcttttcccttagggtatttgggccaattgttatagtgtgtcccactgtgtaaattgaaggtttagccaagtctggctgaatggtttagtcttgcaaaaactaaagcactttgtttttaaaaaaggaaaaaaaagtttaactttttttatttttaacatggcattattggactaaatgatgttaggcatgttaacagagtaaaagggagaacttctttctgcagtttggcaggcctgtcacttcacaggtgtatcactgtccaaatgagggatgccagataagacatcattcagcctcccggaggggtgggggagcaggtgtggcacaatacagtcattgttcattgtcttcccgcttacagtattgtaaaacctgcactgcattaaaaatcctattaatagaacattggattaggaagaatacttaggcttctccctccttccatcagttttaaaaggaatttagaaaaatcactatttcttgtatgtatgagtgggggagggaaagaaggaagaaaagagagactgactttgtctttgaaatacagaagagaacatcttgcagtgaggaatgagaatctaaaaagataaccaggcttcttgtaagaaaactttcatagacagttattcagcaggcagatttttaattttcatgtttccagcttgtttagtctgtggggactttgatttctggaagcccactgggatcgctgctaaaccttacatactttttttgttgtatcaaattcagttcaactaccagaaaattttttttggcaattatttttttctctgtcatgttttctgtccaatgagaggagaagactgggatagccaaggcaaatgctgctcaaattattgtgcccaagaggagagatttggccctgtgatactgcagggggactgttgagaaagagtaacagggacatattgggaagtgtgcagcctgggcttcccaactgatgtcttagctaatttgaaatgttgtgattagaccttcccttattcacgttgaggaatgaatatgctgacagccatatgcatgtgattttaggattattaagtgtaatggaatgtccaaaccatcactcagttttacatagcacccttcaagaactagaatgcctgggaaacatggctgtcccagttaagttgaggttttatctgaaacccattttgttttcaaacatgttggaaatgttcctaaaaatgcctgagtgtgctttgggggtgtgcttggtgagtatgctttcctacccttgagtgtttgagacttgttttcattatgttaggggcttatgataaagtcttcattttcagatctttatgtagaagatatatataattgagcagattttgaagtttcgctcaaatcttgtttgtatttaagaatactttttcttattcattattctgattaatttttcttttaaaactggcaacattttgcaggtagtttatggttttgcaaattagaatatgggtcattcctctaaatagaaacagtgtttttggtcttgatgggtctgtgaattaggtgaaactagttttatctttctccttctacttctaggggaaagtctttacctttccccccctgcacactcctcccaccccacccttccaagcttgatctcagcaaattcattgacttccaaaattcatttatatgactttaatcttaagtcatctttatgaaaatggcttatctttaacttactacctgtttcaggaatagttgcaggcagagcttttttcttatttttcttggtatgaaaggctttgtatcctgctaaaggaatttcaggatttatagttataagtagctatatttttagtcatgagctttgctatggtttgaaagtgtccgccaaatttcatgtgttggaaacttaatccccaaatccatatgttggttgcatttggaggtggggcctgtgggatgtaataagggttaaataaggtcatcaggggggttcccattgatgttacaggtggctttataagaagagagacctgagctagcatgctcttgctctctcaccgtatgatgctctctactatgttatgacatagcgggaaggccctcgccagatgcagactcttgagtttgaacttttcagcctccagaactgtaagaaatacatttctttttcaggacccataagacagagcaaaaaataaaaagaaaaaaagaaattaaaaaaagaaagaaaaaattttaaaaaattcttttgaaaaataaattacacagtctgtgatactgtgttatagcaacagaaaatgaactaaggcgggttcccagaacctttataatcacatcagcttgttaactgctgttccacttgtaagcagctccccctcaggccagatattactggcataagtggaaaacctaggcacctgaaagtttctgacagcctttcagaaagttccagaaaggagtgcctttgttttcctcactaagtgagagattaaaaaagaaaatcagtaaaagtcacttcccctaatgcctacagttgtcatcctggaatcacacttttattgaatccaattcagcaaacatttatcgaagaccagctatgtatagttaaaaccactacacgggccgggcgtggtggctcatgcctgtaatcccagtactttgggaggccgaggtgggtggatcacctgaggtccggagtttgagaccagtctggacaacatggtaaaaccctgtctctactaaaattacaaaattatctgggcatggtggcacatgcctgtaatcccagctaattgggaggctgaggcaggggaatcacttgaacccaggaggtggaggttgaggtgagctgagatcgtgctattgcactccagcctgggaaacagagactccgtctcaaaaacaaaacaaaacaaaacaaaaaaaccactacacgagctgtagaaaagcccatttgtttctcttctaaagtatataatggggctgggcacagtggctcacacctgtaatttccacactttgggaggccaaggcaggcacatcacctgaggtcaggagtttgaaaccagcctggccaacatggtgaaacctcgtctctactaaaaatagaaaaattagctgggcatgatggcacatgcctgtaatcccagctactctgggggctgaagcatgagaattgtctgaacctgggaggcggaggttgcagtgagccgagattgcaccactgcaccccagcctgggtgacagagtgagactctgtctccaaaacaaagaaagaaaagaaagaaagaaagcacacagtgggtgaagaaagtactcactactcaggtagtgagtacctgaccaatgtagaatgacttttaaaattccagacttgggagcatttctcaggatgccagtaggtattaaaaattatttttgaccaagtaaatttggagaaagatgggttaagtgaagttggatagggattttcttttttatcggtgcttccaaagggggatggtatatgcagcatttcccaaatttatttgaccagggaccatgtatttatttatttaggagcagctcagaggactagtgttccatggagaacactgtgacaaaggctgttctacaccacggaagatttttttcctctctctcttttagagggctcttttattttggtgtatacatgtttattattcagagccagcaaactctgtaactttctccattggttatataaaaagtgttagcattttccttggatatttgtgaggttttgaagggccgggataatgaccgttgagtgagctcttacttggtgccagctacattgctgagcatttcctctagagtctcattagtgggaagtacaaattagcagttctgctttttaggtgagaggataacttgaccaatatgcaatttatgcatcatttccaacatgccagacattttaaggtgaagagattttaaaaatcatgtatagttttatatatagattcatatatagttgtaagaagttatacagagtgattctgtgtccctttcacccagtttctcccaatggtaacgtgttgcctaacagtattacagtatcacaatcaggcagttaacactgattcagtgatcaacactttaacactttttagatttttttcttcctttctctcttctcttctctctcgtttctttctttttttgagacagggtctcgctctgttgcccaggctggactacagtagcaatatcatggttcagcacagccttgacctcctgggttcaagcgatcctccctcctcagcctcccatgtagctagctatgaccacaggcatgcactaccatacccataatttaaaaaaaaatgtgtagagatggggtctcactatgttgcctcggctggtcttgaactcctgggctcaagtgaccctcctgcctggcctcccagagtgttgggattacagacatgagccaccatgccctgccattttttagatttcataggttttacacacattctttttgtgtgtgtgtacatttagttctatgcagtttttcacatgtgaaaatttgtgtgaccaccaccgcagttaagatacagaacagttccatcacaaggatcccaaatggtatgcctttataaccatagccaactctctccttctttataattttgtcattttaagtagtctctataaatggaactatacaacatgtaaccttttgagattggctttttaacatcctagctgcttttaatccactgttgccaatttctatagcaatcctatatggattcttttttctttttcttcttttttttgagacagagtttctgtcttgtcacccagactggagtgcagtggcgcgatcttggctcactgcgacctccgtctcccgggttcaaatgattctcctgcctcagcttcctgagtagctggtgttacaagtgcccgccaccacgcccggctaattttttgtatttttagtagagatggggtttcgccatgttggccaggcttgtcttgaactcctgagctcaggtgatccatccgcctcggcctcccaaagtgctggggtgaattcctttaagtagatgaggaagtgaaaccccggaagagtacagtgtcatgcccaaagctatattattagtggaccaggaagcgaggaggggcccaagcatccctgattctcagccttgactcctttcactcagcgttggcctttctctatctggattcccagtgttcatattctgtttctaccaacacagttctccttttctcttcctctgtactcaaaataaagtctctcttgttttttataaatcttaaattttaaaaaagaagcttggatcacattattattttggaagtgcagagattggatattttttccgtccagctctattttggtcttgttaccattttcagtgttttctgtgctgagttgcttcaccaccttgatgctgccacaaatgatgaggatggttgtagtatagagaataaaggtggagattcttgcacatcatttcttgaatccatgtataggcatctttggcttgcagcccatctgagtgctgtattcagcctactagctctggttgctctggtgctaaacatattcccagcgcctttgggacttaactcactacaggcaagaagctgtcagtgcactgagggatggtgggaaagcaaaatgcatacatttctatttatcgcagtagtgccagatgctgtatatttaagaaaaaaacttccagtattggagaagaattgccgtccgcccccctcactttatttatttatttttttaaacagggtctgggtctgtcacccagactggagtgttttgttgcaatctcagcccactgcaaccttcacttcccgggctcaagtgattctcctgcctcaacctcctgagtagctgggactataggcatgtgccactgtacctggctcattttcttttttagtagagatggggttttgccatgttgcctaggatggcctcgaactcttgagttcaagcgatccgcctgttttggcattccaaaatgctaggattacaggtgtacaagtgtgagccaccatgcctgaccataagccttttgaaagctgtacttttgaaatgtatgtgggatgtagtatttaagaagattaggaaacagcaaaatgtgtagatttttgttgatcattgaaccgcctagacattctcttctttcagtgtccatttacgtatgtatgtattatgtatttagagacagtgtcttgctctgttgctcaggctggagtacagtggcactatcacagctccctggaacctcgaactgggttcacaacctcccatttcagcctcccaaatagctaggattacaagtgtgtactaccatgcctggctaattaaaaaaaaaaaaaattgtagagatgtgctctcactgtgttgcccaggctgatcttaaactcctagcctcaagcagtccttccatcttggcctctcaaagtgctgggattacaggcatgagccaccatacatggcctttcagtgtctttgaactagctattccctctgcctggaaaactttcctaagatttccatgcagtttggggcacttcctcaccttcttcaaatctctgtacaatgttaccttttttctgtgtctgtgcctgacatttaaaattgtaacacctcaccctcaccccattctgctttacttttctccatcacactttgatcagctttgaacatgcccctatgtcttcgttatgtatctatgcattgttttctctttcctagaatgtaaacctcctgaaggcagggatttttgcctattttgctcactgctgtatatccaaccttttagaatagtgcctggcacatactagatctcattatacattatacaagtaaatgaaagttttcaagattaaagatttgtatgaattaagttaagtaacagcaccctcttacaggacacaagagaataatcatgtctgtacaggttggcccctggtaagatgctcatttaaaaatggttgtgtcagtttaatataagtgtgttcttttcttgcctacttaaaatgtatttctaactatgacttttcttttggaaaatgattgactttgggggagctctttcagaggtaaaggaagttaactagcagatctaggtaactgaaccttgtgtactattctagaaatgtttatacttctgccaaattgaagcatgagttcagtgtttgcataaccacctgtgcagttactcatagtagcattccagtatgcatttgctgaactatactcttcaattttgcaataaaagtattttcacatgttggctgctactgtgaaaattggtttctctcaaatgttcggaaagcttgtgctgcagttttgatgtggggggtgtggtttagtgctgcataacatttacttttttggtggaagggggatctgtgatgtaaacttttggtttcaatttctctatttggagctctttttgttagtgctaagaattctgagggtatccctatagatgctggttaaaaaacaaacaaagcaatgttgtcattgacagtttggtcaagtgggatgtaagctgctgagtggggtgaagacctggtctccttggggctgatttggggtttgggagtggtttggagggtggctgccattgaggagcaggaagtgtgggggttgctgctgtgtctggaaggacctcctaggggagagctagcaaaccaacatcaccagtgcccccagaacactcagctgtgtgtgatgtggctgtgtgtgcccttgctggtactcagtcctgttaaggcttgaagaggaaggtaaggagggtaagacttggagagggaagagttaaggagggagaatattaatgcagtaaggaagtaattcatattttgagacaggttcccatgtgtgaacacttgacttccaaacagcccacacttggcttcattatctacagaccacctctcctgtgctgcattcagactctcccccaaaccccgacggagcctcggtctgtcgcctaggctggagtgcagtggcatgatctcggctcactgcagcttctgcctcccaggttcaaatgattttcctgcctcagtctcccgaatagctgggatttacaggcacatgccaccatacccggctgatttttgcatttttagtagaaatgaggtttccccatgttggccaggctggtcacaaactcctgacctcaagtgatctgcctgccttgacctcccaaagtgttgggattacaggcgtgagccaccgcacccggctgcattcagacctttccacgtcagctgaactatcagtaaaattctgagcacaactctgagagaaattcagagttcaaatcagttggtatgccagaagcagagaaccctgatccttactggagttgactaggacaccttctctttattagttaaaggtatggctaaatttaaataactaatagaggtcagacacgacttacttagtttctgagagtagttgttaactgtccttttcccaagggaaataagctaagctgaattacttaaaccacactttttccgtttcttaaaatgatttccatttccctgccctaggaaaagtaggcggctgcagagaggttgtgacagaattataaagctatttgagttaaattagcccagtacatcactcttagagcacattgaacagacagctaacacctcctgataagcaccagctacatacagatcaatgttttcaaatgaaaccaaagacatacattcaatttagggagacaaaacagacattactcaggaatctcatagaaccccagatgattatgatataaccaataacataagacccacctgattggcagttctgtgaatcaccctaaaatctctactaaaatggttaagtcctgtactctttactctggagtcctcttgtctacctttcagaaatggttgaaatatttagatgtggaattaatgagattttacatgtctacactcttgctttatatattttaatgtgataaatggcctcatgtatgtatattcttccttgtcccagactcatgttttttgagtaaaatctttaattggtcaaaatgtgttgtattgatcagtatgttatatagaatgatgtacttattgatttactgtaaataattacagtggagcaattctgttaggagggttcgtttttgccattttagcaaggaaaatttgccagttattttggctgaatttaaaaccccttacatgattagatcacatgtctatttctgctgtaatagaggagtgtaagtaactaagtttatctgaacttttaggagtctccttttaggctcaaattagttagtctggtgtctatacagggcctttgttaaagactggatttaaatattgggtggatctgtcttggatcctgttctagggaacgcttcttggaagtcccagacggggaactcatcataacctggttttaccccgtagcatggccctgtgccatcgacaccattagagcaaggctcagtgtctcgagctttagtttaattctcaacccattgatcgctcttgcagtcagcttaacagttgaatgcaatgctgtattttgttttttttttttttttttaaagctagtccagaaattaccacagctgcttctcagttaatcagatgcttaagactcccgtttccacattgcttggctgctacatttttataacaccacagctgtctggatctagcttgtgcccctcgccccccttacccctttccatctgccacctctcaccacttcctcacttgctatgtatcgaggtggcaaattcccaagtaaactgctgactttcctcccctgcaggaaggctgggcctttggttcacagtagcctctttcaccagaactctcgtaggctaggaaccaaccctggagtactgctgctctcagaagtgcccacatttgcctctggagcttgctttgtgtgtttgggtgttgaattttccccttgacttggaaacttttgtgaagaaactgaaaggtgctttcagattaagcagctgtggctcccccttccagccacgctctttgtttttaaagctcaaagtcttatttgaagtgaggagagaaggtaggtaggttgcagtccaggtttttctgtttgtgaatgacgttgcttaccttggctgattccttttcctaatgacggtgcttctactcttggccttttgccatgtgtgtaccatccactgggagctgttttcccttgtcctttaaagcgtatccgactctatctccagtgctcttctagcaagctgttacagtaagcataaaaacaagcgcattaaactaggaataaaatgccaagtttctgtctccttgccaacctcattagaaaacagtgataaagtatgtatgcatataattacagtaattaaacatttgaaaccagctcaatagggaaccttcttaatgcttttatgagtgtgatattttcatttcagaactggactctgtgtggcttctattttattcaagaccttcatctttatgggggtaggcgggggaaggtgctccttttgaccacagcgccaagcatctgcaagagtagctttattacacatgtattagcagggaacagagcaacctttccatcactgtgtttatttttgagggtgtgtagccagttgtcaaatataaagacatgaatggcctggctagtaaagaagacgtggaaaataattgtaaactgtctgccatgatgtgcttgctcttaagagcaaaggacaggaatattttgtcttttgtactgccccgacggagtcatacagcccctgcatttgtgtgggatgatagagtagcactatggggtttgtctgcctcgtagctcttccaccctgagagctattctcacttaggaagtggaaagtctaaaggaccaactgtaggttgaaccaggagtttcattcactaaacatattttttttttagttgatatatatatatgtaaaatttcaatagcttttgaggtacaaatggtttttggttacacggacaaattgtatagtggtgaagtctgcgattttagtgcacccatcatctgtgtatattgtacccaatatgtagcttttttttatccctcatctctctcctcccctcccctcttctgagtcaccaaagttcgctaaatgactctgtatgcttttgtgtacccatagtttagctcccacttataagtgagaacatacggtatttggttttccattcctgagttacttcacgtagaataatggcctccagctccatccaaattgctgtgaaagatatttcattctgttttatgtctgagtagtattccatagtgtatatagaccacattttctttatccattcatcagttgatgggcacttaggttggttctgtatctttgcaattgtgaatggtgctgtgatgtgtgcacgtgtctttttgatagaattacctcttttccttttagtagttgcccagtagtgagattgctggatggaatggtatctttactttcagttctttaaggaatcttcatgctgttttccatagaggttgtactaatttacattcccaccagcagtgtataagtaagtgttctctttttaccacatccatgccaacatctattgtattttacctttttagtaatggccattctggctggggtaaggtggtatcttgttgtggttttaatttgcatttccctgatgatcagtgatgttgaacattgttttgtatatttgttggccatttgtatatcttcttttgagaaatgtctattcatgtcatttgcccactttttgatgggattatttggtttgttttcttgctaatttatttgagttacttgtagattgtgggtattagttctttgtaggatgcatagtttgcaaatattttctcctactctgtgggtcatctgtttactctgatggtgatttgctgtgcagaagctttttagtttaattaggttctatttatttatttttgtttttcttgcatttgcttttggggtcttagtcataaattctttacctagaccaatgtccagaagtttttcctaggttgtctactgtaattggtttcagctcttagatgtaagtctttgatccatcttgagttgatttttgtatatggtgagagatagggatccagtttcattcttatacatgtggctatccagttttttcagcaccatttgttgaatatggtgtcctttctccaatttatgtttttgtatactttgtcaaagatcaattgtggttgtaagtatttggttttattactgtgttctctgttctgttacattggtctatgtatctacttttatacctataccgtgctgttttggtaactataaccttgtagtataatttgaagttaggtaatgtgatgccttcatgtttgttctttttgcttaggattgttttggctattcaggttctttttggttccatatgaatttttttttctaattctgtgaaaaatgatgttagtattttgatagaagttgcattgaatctctagattgctttgggtagtatggccattttcatgaaattgattcttccaattcatgaggatgggatattttttccatttgtttgtattatctttgatttccttcagcagtgttttgtcgttcttgaagagatttttcacctccttgttaagtatatttctaggtaatttattttatttttgctgttattataaaagggattgagttcttgatttgattctgaatttgattgttgttggtgtatggcagtactactgatttgtgtacattgattttgtaacctgagacttcactgagttcatttatcaaatctaggagtcttttggaggagtctttagggttttctaggtatataatcataccactggcaaacagagatagtgtaatttactcttttccaatttggataccctttatttttctctcttgcctgattgctctgactagggctcctggtgctatgttgaatagaagtagtgaaagtgggcatccttgtcttgttccagttctgaagggcaatggtttcaacttttccccttcagtatgatgttggctgtgagtctgtcatacatggcttttattattttgaactatattccttctatccctagtttgttgagaatttttatcataaagggatgctggattttatcgaatgctttttctgcatctattaagatgatcaatagatttttgtgtttttaaaaaattctgtttatatgatgtttcacatttattgacttgcatttgttaaatcatccctacatcctggatgaaacccacttgatcatggtgaattatctttttgatgtgctgttggattcagtttgctagtattttgttgaggatttttacatctttgttgattcaagggtattgttctgtagttttctttgtcttttttttttctgttatatcctttcctggttttggtatcagggtgatattggtgtcatagaataagttatagaggatgccctctttctcaaccttttggaatagtttcagcagattggtaccaatttttctttgaatgtctggtacaattcagctgtgaatctatctggccttcggctttttttttttttttttggtctgttcaggatttctatttcttcctgattcaagctaggaagattgtatgtttccaggaatttgtccatttcctgtagattttctagtttgtttgcatggaggtgttcatagcagtcttgaatgatcttttgtatttcttttggttataatgtctcaattttcatctctctctctctcttttttttttttttgacagagtctcgctttatcaccaggctgaagtgcagtggtgcgatcatggctcactgcaacctccacctccctggttcaagcgattctcctgcctcagccttccgagtagctgggattacaggcatgcgccactatgcctggctaatttttttgtatttttagtagacgtggggtttcaccatgttggccagaatggtctcgatctcctgacctcgtgatccgtctgcctcagcctcccaaatgctgggattacaggcctgagccactgtgcccggcctccattttcatttctaattgagcttacttgaatcttttcctggttaatctagctaatcatctatcgattttgtttatcttttcaaaaaaccaagctttcgtttccttgatgtattttttgtttgtttgtttcagtttcatttagttctgctctaatgaaaaggtctttgttatttctttcattctgctagctttgggtttggtttgttcttgtttctctagctccttgaggtatgatgttagattgtaagtttgtgatctttcatactttttgatgtaggcatttagtgctataaacttaactcatagcactgctcttgctgtatcccagaggttttgatgatgtgtatcactattattcattttgaaatatttcttaatatccatcttgatttcattgttcacctaaaagtcatacaggagtaggttaatttctatgtatttgtatagttttgggaattccttttggagatgatttctagttttattccactgtggtctgagaagatacttggtatgattttgattttttaaaatttatcaaggcttgttttgtggcctatcatatgatgtgtcttggagaatggtccatgttctgatgagaagaacgtatattttgcagttcttgggtgggatattctgtgactatattaggtccatttgttctagagtatagtttaaggttgatgtttcttagttgactttcttccttgatgatctgtgtggtgctgttagaggagtattgaagtctgcactattattgtgttgctatttcttttcttaggtcgtgtagtaattgttttatgaatctggagttcaagacttaggtgcatgtatatctaggattgtaatatcatcttgttcgattgatccttttattattatataatggcattttttgtctttttttactgttgttgttttaaagtctgttttatctgatgtaggcatagcttttcctgctcacttttggttctcatttacatggaatatctttttccaccactttacctggagtctataagaatcctttcatgttaggtgattctcttgaagacagcagatattcgatttgtaactttttatccattctgccaaagtatatcttttaaatggagtatttaatctcaagatgcaaggtactgttcagttatgttgattgttacataggtacttagttttcttcattgtattattgttgataagtcctataagttttatgctttctagaggttctattctggtgcatatcaaccttttgattcaagattaataactccttttagtatttcttgtagggttggtctggtagtgacacattccctcagcatttgcttctctgaaaaagactccttcatttgtaacacttagtcttgctggataaaaaatgattggctgacagttattctgtttgaagaggctaaagataggactccaatcccttctggcttgtaaggtttctgcggagaagtctgctgttagtctggtatgttttcccctgtaggttacctgatacttttgtctcactactcttagaattctttccttcatgtttactttagatagcctgatgactgtatgccttgatggtgtcctttttgcagtgaatctcccaggaattatttatgcttcttgcatttggttacctaaatctccagcaaggccagggaaatttttctcacctattttctcaaataagtttcccaaattttttgctttctcttctccttcagtaacaccattgattctaaggcttgactgttttacataatctcatatttcttggagactttgttcatttcttttaattcttctttatttttgtctgggttaatttgaaaggcttatcttcaagctctgaaattcttttttctacttgttctagtctagcgttaaaactttctactatattttgcaatttcctaagtgtatctttaatttccagaagttcggattggtttttcttcagaatatctgtctctttagaaaattttttgttcatactgtgaattgttttttcaatttctttatgctgatttttacctctgtcttgtatttccttgaacagctttaatagtccaccttttgaattctttatctggtatttcaaagatttcatcttggtttggatccattgcagaagagctagtgtgatcttttggggttgttatagaaccccgttttgtcatattgccagaattattattattattttttgagatggagttttgttcttgtcacccaggctggagtgcaatggcacgatcttggctcactgcaacctctgcctcctgggttcaagggattctgctgcctcagccttgcgagtagctgggcttacggtgcccaccaccatgcccagctaatttttgtatttttaatagagatggggtttcaccatgttggccaggctgatctcgaacttcctacctcaggtgatctgtctgcctcagcctcccaaagtgctgggattataggcatgagccaccgtatctggctgccagaattatttttctagttccctctaatttgggtaggctattctaattattcttgaatttatttttgatttgacttaaaaattttttttctcccttgaggatgtgactttatcgtttattgtaggctaattcagctcttggtgctttcagggatgaagactgtgtatgacttccttggttatagagagtctttgtatgacagctttcttagatgctggttgtagtagcatagtgcttggtttgtgagcaggttcattgtctcctgtgggattggaattgcgaggtctcttaaagcttatctcattgcactttttaattaattaatttttttctgcagtattttatttactgagttgaacagcttaggcttcaggccagtaggagagatgtccatgggtaaaaatcagttgtggctaaagcaggttggtaaatgcaatactcagtggtgggcagaggtcccagccttgatagaagcagctggggcagctctcagtgaaatgcactgaggtcttttcaagggaaagggaagaagccacctcagcttccctgctaggccagcaggaaagtgatccaccttccaattacactcctgacccagagttccagctattctgatcaggcacctcttttcatctgcaggaatgttgatgttcaacatagaaagggattgtgactgtacccctcatccaagcttgaacctaggggacatgcattctctgtggatgcagttaccctgaagtattccagaaaggctgtctacaggtgcatccatgctgagctcccatgggggaagcctcagctatgtcgatagtggatgaagaggagaagaaatcaccttctccaagacccttcatgggcaccagggctgactggctgttggggtagagccacagacgttttctgctgagccaagcattgcaactgtgcctctgctaaaagaaacttcccagaaatgggaagttctgggacttaaggcctgccatcttgtgttttttgtttcatggagtgctcccttgatgtcatgtacttcttcttcccttaggagtagaaatccctgaagtccagactactgtgaatgcaactcttatctgggtctagctgcctagtggggctgccacactccagggtggtgctgggggatgtctccaaggaatccagtgatgtgacctgtcctcaagtatcccagcagtgggtaccagcaccagttctgatggggatggcaggggagtgctgtgagattccttggtcatgaaaagccttagtgtgttggttttctcaagtactggttgtagtagtagatgaactggtcacatggacagactcaggatctcttggttagccagggtgttgcaggcaatagtgattgctgaggtcacacatgacttttctccttcctgcatgttgtcttcttctgcctgaagatgctaatctcctatgtcagttggcctccaaccagaaggtggtgcttgcaaaagagtaccagctgtggtggtggtaggatttatgctttgccttatgtacccaggggaagtactctggtgtctcaggcaattggtggggctatagagctccgaaaagtttctgttctttttattaagctaccagggtaggattgaggggcaaagccaggtgagggctgggtcaggcaagtctgtgctctagctctccatatgtgggcaaaagtagaggtcccagtggggatcagaaggcagttttctgactgctggggtatattgaaggaaaaagcacagctgcttctgctgcaccaaagagtctgcatggagaatggggagtagcaggtagcagcaagccctacgcagctttcatgcacttggcaaggcaaatctcatagccacagtgtaccactagcagcagctagctgggtttcagacagttgacactcagaactcaaaactgccccaggccattagcctttgcatggccttcaggccacatttctcttggtctccctacacagcaggggcacccctgtgctctcttatggctgcagcacacttcccacttgcccctcagttctggccaagggagcttgttcccactcatatcgtgaatctcagttgagcttctctcaacctgtgattgctgtctgagttagctggctgacttccacaaggtcccctgtgaggtaggatcagcagtggcttccctctgtccttgctggagactgggagtgcactgaaagcatgtccagtgctactccttctcatatactccccacggctcactgaatcagctttagtgctgggtagggttgagggcttcccttgtggcctggattgccaggttccccagtaggagtgcatatcctagaggtagtttatcctcctctcacactctagggacttagagttttccatctgcctcgtagtaagtttctgggttttttcctgaaaaaaaaattcacagtgtgaatctctccacactattttgtctttccaagtggtagaggcatgctcacagtgcctccaatccactctcttggggattaaaaaaaaaaaaacaggtgttattgggtacctttggggtgagagttagtgtacaatttagggacactattcttggaaccagacagaccttggtcagactcctggctcagtcattttctggttgtatggaccacagcaaatttaaaactttaaatctcggttttctcatctgtaaaactaaaataatggtggtcacacatacccataagattattttgagacttaaataagataatgcatacaaagcatttagcacaaagtttgactcagtaggtgctatttggtgttcatgccattattagctttgtattaaagaggtatatattgtcctatcttctaggagcttacagtccagtagggccataagatacatattgaggaaagaaagggggatgtcagcctgctgtgatgtgttgggagagactttcttgaggagttgggattggggccactgtgttgtacaatgccagggaacaccatttacatcatctttgagaatgggtccctctggagtagtacagttgcactgcttggaattttgaatgtgaccatgaaggatgtgtagaatttggatagatggaagaaggaggggtttgggtttggtaggaaaaaacaagattctttcagaggatggtgagacctctcagctggccagagagctttttgcattgagcagaggtagtcaggctgtgtgtcttgaggtggctccagggctttgcttctttctgatcactaaaaggtggatggaatgaaccttctggtgaaatgggtacaggtcagggtgaaatgcctttgatctcttcacattgccttccttgagtctcctcaggggccgggattgctatatttccaaaagggcacttttctgtgaatagccttttagcctggttaagtaaaccaaaaggctcacttgctttttctgccatttctttttctttaacattacttgtaactcattttgttaaataccacatttactcaatatgtgaagtgatcaagatgttgtatgtgtgaccctgtaccctggttctactttgtatagccttacatttcttttgaacttctttatgcactttttttctttccttttcttacctccatggaatttattctgctctttaaggactctcaaaggcatagtagatcatggcataaattaggtggcaagaaaggattttctttatcattaggcttctattcttctaaagctgtgtctttgggagattttaattgtgaggatgtaaataaagccatatggaccaaaagtgaatagcatatttaattatcttgtaaataactttagcttagtaaatctccgacgttattttaaaaacacagtattttattgggtatttagtattatatgatactctaaagcagaagtcaccaaacttttactctaaagggccagatagcaaatattttaggcttgcaggccgattctctgttgtagatactcagttctgccatggtagtgtgaaagcagccatagaaagtatacaaactgatggaggtggttattttgcattaaaactttatttaaagcaatagacagtgggtcagatttggctctctggagtggtttgctgacccttgccgtcaaggaaatagaaagagattttgttgggttgggaaggtaaatggaaaattacaggaattacaaaatttccagataatgaactctacaaaaaactaaaaaaaacttatacctcctattgtttgaattagatttcatgtttgatatgaatttgtaaataaatcccaaatatctttattgatagttcttcctttttaaaatctaaggacttggttcacaacaggcctgtctttattaatcaaccatttattgttttctttgcaccaggcactgtgtaggtcattggaaatttacaaataacttagacacgcatttttcctttaaggagccacagtctagactgtgtactcttttttgccagatgtggactcatgccttggaccacatgaaatatttgctctaaagtagcaagaaacctgcattggaaaagggactttttgagggtacacctatctttttttctctttctactatatgtgtgttaggactgctatattttcgtttctctttattgttgtattgttagagaaagtctgctagaatttataaatggtgagaatattttgataacttagttgccaaaattcctagtcttgattccagaggttgtgttttcctgccctttaaaattttcacttagtcaccttaattcagtttttgaatttctttgagttctgcctatcaaattataaacaagcaccaccaaattgcagaaggttatctcttaatagtattgaaataggcagttataaaaaattgtgtcacctaagtctaacagctcttctagaatgttttcctttagacctaagccattctggcccttgcacattgggtgggtctgtgatctgtttctactcacaacacttctgacacaaatggctggattttttccacaccaacaaccaattcttcgactctgacactacccagagttagcacagaccccacagattatgggcttagacccacaagactcttctccactttagatgccagttgtaagtccaggtctcctatacttctgaccaagagatgataaatcttgagtttctatgagccccactctttgggttcagtaattctctataaaggctcacagaactcacgaagtcactttacttcctattactggtttgttatagaagttacaacccaggaacagccaaatggaagacatgcacaggacaaggtatagaggaagggcattgccctctctagatgcccaccctcctagcacctttgtgtgttcaccaatccagaagctctttgaactctttaacttagaggttttatggcgtttccattacatagtcatggttgactacatcactggtcattggtgattagttcaatctccatcccttcttccctccccagaaatggggcaggggctgaaagttcattcctcaaatttcgtggttggttcccctggcaaccaccagccctcatcctgaagctctctaggggcccaccaagagtcatcacatttgcctaaactcaagtatgattgaaaatgggctataataatgaacaagagacactcttctcattcctattgcccaggagattccaaaggttttagaaactctgtgctaggaactgggaatgaagaacttatttttatttttttaagacagagtctcactctgtcacccaggctggagtgcagtggctcaatctcagctcattgcaacctccgcctttctggttaaagcgattctcatgcctcagtctcctgagtagctgggattacaggtgtacgtcaccacgtctggctaatttttgtatttttagtagagatggggtttcatcatgttggccaggctggtcttaaactcctgactccagttgtgtccggagttggttccttccagtgggttcttggtctcactgacttcaagaatgaagccgcggacctttgcggtgagtgttacagctcttaaaggtggcacggagccaaagagtgagcagcagcaagatttattgtgaagagcgaaagaacaaagcttccacagtgtggaaggggacccgagtgggttgctgctgttggctgggggtggccagcttttattcccttatttgtccccgcctatgtcctgctgattggtacattttacagagtgctgattggtgcatttacaatcctttagacacagagtgctgattggtgcgtttttacagagtgctgattggtgcatttacaatcctttggcaagacacagggcgctcattggtgcatttttacagagtgctgattgatgcatttacaatcctttagctagacacagggcgctgattggtgcgtttacaattctctacctagacagaaaagttctccaagtccccactcgacccaggaagttcagctggcttcacctctcacaagtgatctgcctgcctgggcctcccaaagtgctgggattacaggcatgagccacaatgcctggccttatatttcttattatatcataaaatcacagtggagttggatgggggtgagggagggcagtctgtgaaagagagaggttctgaagtccaaatgagggcagaatgtggacttctctggccctgaggagtgggttgggttgagtactatggggtgatttgattggacaggttctgatgagtctggtagtgggtacctcaggagccatgaggacatttaaatgtcacagtgtcacagaaaacatagaagattgttccctaacttgggtagtggcatgagaaagtgggtctgttgttgggaataaggtaggctcggatggtggtttttgagggtgccaagaaatgtctttataaggtttcaaatgtacatagatgtagaaggaagaatggtgccattctaaagtttttttgaagtgaaaaacaaaaataatatattttaaagatacaaataatttccataaacatataacaatccatagagaagagggtaatgtccttctggtgacattaattgaaatactttatgccagattggacaaaatctatgtttaaattactggtattagtattttggtattttccctttagtaagataatcttgataaccttgatttgctttttgtgtcctgattaccttgacattaatatcttgaaatagaaaaactgtggttcttgctttggtagtacatatactaaaactagaacaataaagacattaacatggcccctgtcgaaggatgacatgcaaatttgtgaaatgtttcatattttttaaaacaaaattatggcttgtatatttttaaaactttgtattatgcaaaacttcttgagaacaaataattatgggaacttttaaatacatgcaaaaatagaataggataataaacttcccatctacattttatttatttatttatttaatttttgaggtggagtctcgctctgtcgcccaggctagagtgcagtggtgtgatcttggctcactgcaacctccacctcctgggttcaagcaattctccctgcctcagcctcctgagtagctgggattacaggcatttgccaccatccccgggtaatttttgtatttttagtagacatggggtttcacatgtttgccaggcaggtctcgaactcctgacctcaagcgctccgcccaccttggcctcctaaagtgctgggattacaggcgtgagccaccgcgcccggctggtttttaagacatgaaatttcagaatgtttgttttcaagaaagaaagcccaattgcctcaatgctttatttgaggacagagcctgaggcacaggagaatagcacggtgggacattactggcaccattgccaacacagctcacacgcagcaacagcacgttttgttggttttgccagcgttgatgctcagatccctctgtggccaccaatagccagcacctgtgtcaaaggtggctgcctcaattaagacacaaaccaaaaattctaattatatagtagtttctgtagtatcagccacgtgtacaataggtactcaggtgtcatttgctttttcttctaccacaagagtggccttggactcgtgtgtccgttgggtgatggttgaggttgctctgagccagtcccctcccctggtccactcagtggaagctgtgtatgcccacatggcactgtatggacaccagtttgtgtttttttaacaaacattgctatttttagatttgctttcagaatgcgacctatggggcagaggacccagaaatatatagcttctacctcattgcctcgttctcagggatatccaagcctcactgccttgagaaattaagagacagttccagcaggtactgtcttacttgatgactataaattctataatcattgctaataatagagtgttttgttcaagccgcttaaatttgtttattttttcctctcggcaagcctaacatcatcatcctcaaaagcatggttgcctgtgaatttccttttggatagatgtaacactatttaatttcgcccatccattcatctatccaagcatccagcaaacatttatcgagtacctattatgtgctgagtactcttttagatgctggagggacaatgattaataagataatctttctttacagagttcacattcggtgagagaggaaagttggacattaaaacagatagtaatgtggtgagctaagtgcagctataaagttatgtacaacttatcaggagaaccgttatctaaggcatccagttcacagaagggaggagggaacaccatgtaggcaaggggaatttcactattattgccatatatccaaggccaagagtggtgagagaatgggctggagatgtaacaaaggtgctctgtgacagagtttgaacttcagtttgctggtgaggtgtggggaagtctatgaacgggattcgaacagttgagtggcatgattatatttgtgttctagaagaatccctctggtggctctgtgcaatgtggttttcagggagtgaggactggagacagagtagataagtgagaatgctgaggggcctaatgattcgttcatgcatttcatttagtaaacatttattgagcacttactatggaccatgccctgttatagtcatttggaatttattttcacatagataaacagaagagataaatagtagtagcttttttgggataaatagataccaaataaatcacagtgttcgctttgatcatgacaaacttttgaatacatgttttctagagttatatattgatttggtggtatttttattttggatttggatcagtcagcactaacataaaaaatggcctctttcatggtgcaaattagtaaggcttcactttcagctcttgaatttttccaagactcattattccagtctgtagattattctgagccttagactctcattttctgctcattagcacctcaaagaatggagaggaaggaagagagagaaacttcagtctgacttgctacttgttagaagatttggtaaagaaggtgatgaaattaatatttagttttcaaaatcaggttacagattgtttttgggcttgttcttgcctgcagttcttgctttctctcaaccatagctaacttgctgtctggatacatccgagtgtatttgcctcatgcacaatgaagggtaggattaaccttggaaatttgctgtgggcaaatagcccaagaattaatacatttaataatacatttaattattttaccaatcacactggttatttgcagtgtcaaagcagttaccttggtatgatataaggacatggaattaattttgttgtttataatctttgtgtgtgtgtggggtgggtggtgaggacggaatcttgctctgtcgcccaggctggagtgcagaggctcaatcttggctcactgcaacctccacctcacagattcaagtgatcctcctgcctcagccttccaggtagctgggattacaggtgtctgccaccacacctggctaactttttgtgtttttagtagagatggggtttcaccatgttggtgaaactgctgacctcaagtgatc

SEQ ID NO: 125 - DNA, 2458 bp, Homo sapiens
cttgtcttacaatttttaattgtttaaaagaaggtttgatatataaaaacaagaaaaggagcagctttgagagttaaaaaagccgaggctgaaatgatgcattacaaagtatatagattctgtactccagataagatggggtttagagggagtggtagaaacatttgctccttaatggcaaaggtaataaactcctgctctcactgcaagaattgaccatgagatggggtcaggaatcttcaggggagcagacagtggtgtggcccttgtctaggtctccatttatacctgaagatggagcggaatacgcactccagatgcctggaacaccattgcatgggagtgtgggtcacggatccgagggatacacactctagatgactggaagtcaatagcctgggaagcgcaggtcacaccccgagggaaagggcttcaggatgaacatctgcagaaggcgtggacaaggatgggaggcaacagggtcactgggctttccaggactcagagaatcaaaaggcttccaggtcatttctggtagagctgttggtggttacaggaagcaatttggatcccagactcctggagatgaacagctttacggtgagctcagctctgagtgtggaagcactgccatcccaggggcttctgtcgcagaagaaacggaaatctggcaaaaggatggccaggctggccagaaaccactggtctagatagaaaaggaatatgctactgttgccagccaaggctttgtttgttttggggaaaaaatattgctctgagtgaaatatctatttctggcatctattaacaattggttatggttccttgttttaattatatcattacatttttaaaatgaaggatttaatttgcttttgctcctatttgttgctgatgtcgctcagttctccaaatggctgctgtcttcctctagtacttagtctgccatctagaagcaaattaaagacacccaagaaacttcagttattgtattggtaactataaaataatgattaacaaacagaaggacaggaagcgggagaaggcagtcaagtaggaagtagaaaatctaacactgagagagcaccccccaacatagggactgtgtggaggttttacccaaatgatgcttcatttaattttcaccaaaagaaagtgaggtccttccccatctgagggacaggcctctgacacccatctccgtagcagtcatcccacaggttggccatggctgagtaggtcagggacagacaccttctcgaagctgggctatcgtcctctcactctttgatttggaattcagtctttatcattgaagggttagaactgtaatagacaaacaattgggaattaagaggctgccagatcctgttatatggagtaacaaaataggacattagatggatagatggagagagacagaaagagagatggatagatggatggattgagagatgatagataacagatagaggacaggaaagaggagagaaagaaagaaagggcacgagaaaaagaaaaagagagagagccacgtacagagagaaatgtgcatgggaagcagagccccggttccagtttcttcctgtagttcccctgcattcctattccttggttccatgagacaccccaagtccttacaacaaactctcattctaagctaaaagtttgtttctgttgcctgcacacaaagactcctaactaataaaacagtgaacaaaatgactgatatctgtaatagggtaacctgataacacttttaagattgattagattgagaccaaacagaagggaaaacacctaggcaccgtgaagacctatacagtcattaacattctcctgacttagaacctgtgataattagggagtgacctgcagcagtttccttcactctgtgagccatgcatgcaaatgaggggtgcaggagaggaatgcagacctggggcccacccgcattcaagtgcaattgatggggccattgcaggtcaccctgatctgcccagtgcccctagctgctgctggtagacttgtaggatcctataatttaggcttctcattaattcagatgaaccgtgactttggtgtgcccttctccattccagttatgtggaagaaatttcatctcttggtcttttatgcattttaagatttgatagcaacgctagtggctcatgcctgtaatccagcactttgggaggccgaggtgggcagatcacaaggtcaggagatcgagaccatcctggccaacatggtgaaacactgtctctactaaaaatacaaaaaaaaaaaaaattagctggcgtggtggcacgtacctgtaatctcagctactcaggaggctgaggcaggagaatcgcttgaaccagggagtcggagattgcagtgagctgagatcgcaccactgcattgcagcctggtgacagagtgagactccatctcaaaaaaaaaaaaaaaaaaa

SEQ ID NO: 126 - DNA, 839 bp, Homo sapiens
  misc_feature (575)..(575): n is a, c, g, or t
  misc_feature (638)..(638): n is a, c, g, or t
  misc_feature (726)..(726): n is a, c, g, or t
  misc_feature (741)..(741): n is a, c, g, or t
  misc_feature (764)..(764): n is a, c, g, or t
  misc_feature (835)..(835): n is a, c, g, or t
aagtgatgtcgttttttttgttacagttaccagtatgacaggtgggaaggggccgggtggggttctggccagagggacctaagaacattaggtcctggcaggtgcagccctgggagcagccacgagggggcatcaggctgcacaggcggctccaggatgtcggtccgggaccgggcataggggttagcgagtgattctcgggcaccgcaggacgagccctacacagagcaggtgggcccaggaaccccctttctcagtccaggactcccaggcctcagggcctggctttggtggcgcccgtctgttgcagtggagttcggcggtcacagcctagggaccgggtccagcccagccagctcagcagcaggtcagcgccctgccccttcccgcgtcgctgggacgccccgagccgctcaggtcaccacgcaaaagccctgggtaatccgccgccagaagttgcgaccgcggctgctgagggccacctcggcggcctcctggaagacggcgtggacgttgtcatggagccgagccgagcactcgaggtaggccaccgcgcccacggaccttcgcatctnctggcccctgtggtaggtcacaggctccaatccgtttctttcgagcttgtttaccagtgattngtccttgcgcaggtcagtcctgcagcccacgacgatgatgggtaccttcttgcagaaaatgatcactttctggtaccaccgctctaangatgttgcaagctgntctggcttgtgacatcgaagcanagcagcaggacgcctgctgtcagggtagaacaggggcccgcagcgggcatagtcactcttgcctgctggtnccca

SEQ ID NO: 127 - DNA, 5418 bp, Homo sapiens
tttctttctcttgtactctacacccaaaacatcagaaaatccttttgactctgacatcaaaagacatccagaatatgacccatttttacaattcctcttgctacatagctggctcaagccacaatcatcttagagctagattaagagcctaggtattataacagattattgttataataggtcattgtgatagatctccttgcttctgccctggttccctataggtttacactcaacatagcagttaagagcttttccttgaatatattaggtcatgtcactctaaataaaagccctgaatggtttcccagcttcctcagagtgaaagtcaaagtccttacagtgacctataacaaactcaaactataacaaaacaaagttttcttccctcaccttgcttctctgaccttagctattactattctccacttctcattctgttgcagacatcctggtctccttttggccctcagagactccaaccaaactcccacctcatagcatttgtgtcctgctgttccctttgccttgactgctcatccccaagctacccagaatgtttgtttccttgtttttctcccctcagttctattcttaaacataacttattttattttattttgttttatttttgagacagtcttgctctgttgcccaggctggagtgcagtggtgcaatctcggctcactgcaacctccacctcccggcttcaagtgattctcttgcctcagcctcccgagtagctgggattacaggtgcacaccatcaaggctggctaatatttgtatttttagtagaggtgaggtttcaccatgttgaccaggctggtctcgaactcctcacctcaagtgacctacctgtctaggcctccccaaatgctgggattacaggactcagccaccacgtccagctacataactttattatagaaacccctgaacactttacatcaaaaagcatcactcactctaaccctgtcagagccccccaccctgctctgcttctcttcataacacttaataccattcagcactatgcattttctggttttttcctgtccttcctcactaacacgtaagcttgatagaaggagaagctgtatgtgttttgctcagtgttgattctccaccacccagaacacctcctagcataaggtcagcactcagtaagttgctgaaggaaagaagggatgggtttgagcagagtggagatggagatcagctgatgaacttttgagatctagtaggtggcagaatagtcagattgtgatgaattgttgggtattgagcaggaaaagggagatgaaggaaataagagggctctaggaggctctccaagtttctgccctacacactgagttgatggtatactgttccctgaaatagagaagatgggaaaaggatttgattaaggacagggacagagaaggataatttcaactttgaggaagttgagattcaggttattaggacatattcaactgaagatatcctggaggtagctggctctagaactattaactgagtttgtgctgaacactcatctctgttaggtacaaaactgcatggaaaggagatgaagagagactgtatagtattgagtcattttccagggaaaagctaaatccttttcaccccttcaggtgaacttaccaaaccagctgctactcagaagctcacagcctttcagaaaaaggtattctccaagcctccaaggagtcttattgtctcaaggcaaccatttttcagtttgactctaggggtgcgtgtttgccattcagaacctactatattttaccgcacctcctgacattgttacacaacatttattgaaagcacatttgatggtaatgaagtttctattaactatgattaaatctcataaagcacctgaagataatttaagatgtgcagaagcagaaaatgaaacattcggtttagtacattaggaaacgtaattgattaaattatctcatttacaataagtgctttcatgagctatgcagtgcacatattttccccagtttgtcattatgatttgccaacagatatcttaagacttcactttctttttacacctccccgcaactctaagctcgtgcctctgcctgcctgctcatggagcactctgtgcagagctctgagtgatgttttctatctgccaggccttatggaagatcatgtgtatggctatatataggcacaggttgtttctcaattatcttcataattgactttgattttgcattagtgatgattcatgtagtctcacattaagcccctctttcactgaacaactgcagcctgaatttctataatgcactcctaaccatgcagcttacagaaccccgattggattcctctgggagccttttgcaatcacattgattctctaaggtcttatttttagagaaatcacaaattaaaacagtttaagcgattccgttgcagtatccagcaattaagcatggtgctcaggaacgagaaccccaagcaaaaactaattctgaagtccctaaggactggaaatggcttctgcggggtttatgcctggaagtacagatgtaaccaaattagaatggcacaggactcacaaactaagtgtgaaattaattttaaaaacacatacatgcatttctaagtaactctcacattggccaccccatggatacctatgatcttttttgtgctatatgacagaatcagtggacagcatgcaccatgtggccgggagcaaggtaagagtccacttactccacctgtcatcctgagggtcctgacacaagcacaggccaaatattcagtgatctgtttatttctctctccctcaatgcccatacacatgaacacacatatacacagccaggtgcccccaaactcagtcttcccataaattcaaaatcaaacatgcatgatgtcagaggaccaatacttaagtagtaatgattttttttaatgggcagcagacagcagggaaataagtttaaatgtttatttttgctgttttcccaaattcttagactttgcaagtaatgatatctttgtatctccagccttcctgaagcaacataaggaaataggaacagaatggctttactggatttttccctcatgtcttgtgacccctgtcccaagttacctatttctgtctatcctcacagggtcttaattctctcaaagaagttagctcataatagctattaactcttccaagctctttgaattttaataccctaagatttaaaagatcaaaagtcattcagttgatactagaatgagagatgctaggcagggacgtctttcacaagctttacaaaccaaaccagccaggccgttgtctaatctcctactaatgagagctgtattaatgttgccccagtatcttgaagtttccctagcgtcctttacatatttctgatgtatgagaatgacttggggaacatattaacacatagattcttaggagctcctcaaccaggaattcaaatttatttgttctgttctgaggtggtgcatatttaatttaacaagctccagccacactctgagattctgatgcatgtggattctgatccaccttttgagaaacatttttctaaaatcatggttctcagccccacctgcaccttggagtcacctgaggagctttgaaaaatagagatacctgggtcctgaaaaccctccaccttaaattccaatagccttgatacagcctggaaattgggaattttaaaaggcctacaggtgatactaaagagcataaggtcaaatgccatactgctagccattccagccatctcctctctccagctctgcaggaagcataaaatgaagacaatgcaaaggcctctcccataagcaagcctgggtacaacgagcctaagccagtaccaacaccccaatcctcagctcgtcattatttcaccatggagttctggatcctaatctgcccagctgccatggattccacaggagattcttatcaggatgagaaaagcagtgagctttcagcctgtcactctattatatacaaccagaagcctgctcaggaacgaagattactctgggtagcagaatgaaactccattaaaaacaggattgaaaggctgggtcttacagaggagatcagatcatgaggactctcccctcatgaatgaatgaaagaatggattaatgaattaatgggttatcatagaagggaaactggtggcttcacaacaagatgagagatctgacctcgaatatttgcctgctcagcctcattgccatgtgatgccatgtcctgtgccacctctggactctgcagggagtccccaccagcaagaaggctctcaccagacatagctcctcgaccttggatttctcagcctccagaacggctctacagattgattttaaagccacctacactgcagtttcttcaatttagctctacttatctgattatgcatcacaaaaggaagcagaaattcagcttaattgtgaagccattgcagcagaaccaagcaaatgatagaaaacctcatgatcacagacagaatcacactcactgatgctgaatgaaatgacagacatccgtccctctgcagaagcctgaatactgatcacagaattttacgttctgacattgtgtgtctcttgtcagatagtgttgtcctttactttccccgcttcagttgtgaaagtcaggtgcagtctcatactatttttttttaaaattcattatgacaagtaaatggtctctgggaaagcgaacatcctcatccactgtttactgaaactgtaacactgtcatgagtgaagaatgaaacatgtttaatgtaaagagtttgcagaatgatgatcagaggaaaagaacattaaacagaagaaacataaatataagaatggggagagagatgtaatcaaaagacagcttgtaagggaggttacatgctgccatttgcttttcagctgtgttttccatagtgggacagatcttgctctttgttacttctacttttgctttttcccatctgcaaagagggaaacaatctgcttttgaatctctggtgaagcatcacctagaagctgctgccaaagcttgatatccagagtgctctaaaacatagtgtgatgtgccctttcatcttaaaggattatttttggctgggcagacctctctaagatagattataaggagctggcttttaaaggcaatgaaaactgcttctgtattcacatttaccccctccctccattatctgaggtatgtaaataatgttttaaagtggtgatgtgagaatattaattatgttttcatttcttgttcctgttaccatgtaatatatcttcaagtgctgagaaaacatcttacaaaaccattaaagattccaaatgttcatacataaaaaaaaaaaaaaaaaaaaaaaaaaaaag

SEQ ID NO: 128 - DNA, 2275 bp, Homo sapiens
ccctaagctcacccctgaccatacaccctctgcaggcgctatcttctctggcctcccactctcctcaggcacctctctcttccctgatcatgccccctctggagacccaatcttccctagccccaccctctctgcagacacctcctgcttccctgaccacaccccctctggagaacctaccttctctagccccgcctcctctgcagacagcttctgctcccctgaccacaccccatctggagactccaccttgtccagccccatgccctctgcaagcaccaccttcgccattgaccacgccccctccggagacgccctcttccatagccacgcctcctccacaggccccacctgctctggcctcaccccctttgcagggcctgccctctccccctctgtctcctttggccacgccccctccacaggccccacctgccctggccttgcctcctctgcaggcccctccctctccccctgcctcaccccctctgtctcctttggccacaccctctccacaggccccaaatgctctggcagtgcaccttctgcaggcccctttctctccccctccctcacccccagtgcaggcccctttctctccccctgcctcacccccagtgtctccttcggccacgcccccttcacaggccccaccctctctagccgcacctcctctgcaggtcccaccctctccccctgcctctcccccaatgtctccttcagccacgccccctccacaggccccaccccctctcgctgcgcctcctctgcaggtcccaccctctccccctgcctctcccccaatgtctccttcggccacgccccctccacgggtcccaccccttcttgccgctcctcctctgcaggtcccgccctctccccctgcctcactcccaatgtctcctttggctaagccccctccacaggccccacctgctctggccacacctcctctgcaggcccttccctctccgcctgcctcattccctgggcaggcccctttctcaccctctgcctcactcccaatgtctcctttggccacgcctcctccacaggccccacctgttctggcagcgccccttctgcaggtccctccctctccccctgcctcacccaccctgcaggccccacgccgccccccgaccccgggtccggatacctccgtctcgggcccacggctgaccctggcgttggcccccggcccgccgccgccgccctcgcgcagcccgtccagcacgctgagcggcccagacctggccggccacagcagcagcgccacgagcacgccagaggagctgcgtggctacgacagcgggcccgagggcggtgccgcagcctccccgccccccgacgcagagctcgccgcttgccacccggctgcctggagtcgaggccccgctccgccgccggctttccgcggagccccaggtgcgcccctgccgtggcctcccgctaccggaccgggctctgctgacggtctgtgcaccatctacgagactgaagggcccgagtcggcgacccccgcccctggcgcactggatccggggcccagtcccggcacgagcggtgggaaggcggcggctggggccggggccggggcgtcctcgcggagcccgaagcaggcgcgcctgggcgagctgccactgggggcgctgcaggcgagcgtcgtgcagcacctgctgagccggacgctgctgctggcggctgccgagggtgccgcgggcggcagcggcgggggcccaggaggtgcggagggtggtggcgtcacagggggcgcccgggctgcactcagcgacgccgaactcggccgctgggccgaactactgtctcccctggacgagtcccgtgccagcatcacctcggtcaccagcttctctccggacgacgtggcctccccgcagggtgactggaccgtggtggaggtggagaccttccactgagccagaccacagccccgcctgctacaccccacccctgccttaggatccgcccctccgggtacgccgtttgttttagaccccgcctccactgccctggagccccgctgggtggattagtcttagctccctagagcctgagcctttggcctcggaggctcgggacctacccatagctttgacctaggcccgcccctcgagctccgcccctttggcctaggacacgccccgtttccccgagtcccgccccgtgtgcagtgtattgcccaccccgcacagcctgagtttgcaataaaactgggacactgggacttgcaaaaaaaaaaaaaaaaaaaaaa

SEQ ID NO: 129 - DNA, 4165 bp, Homo sapiens
ttcaaagaaacagcagcttttggacattttaatgagttctatgccaaaaccagaaagacatgctgagtcattgcttgacatttgtcatgatacaaactcttctccaactgatttgatgacagttaccaaaaatcaaaacatcatcttgcaaagcatcagcagaagtgaggagttcgaccaagatggtgactgcagtcattccacactggttaatgaagaagaagatcccagtggtggtagacaggactggcaacccaggacagaaggtgttgagatcactgtaacttttccaagagatgtcagtcctccccaagaaatgagccaagaagacttaaaagaaaagaatctgataaactcatcgcttcaagaatgggcacaagcacatgcagtttctcatccaaatgaaatagaaacggtggagctcaggaaaaagaagctgaccatgcggcccttagttttgcaaaaagaggaaagttccagggagctctgcaatgtgaacttgggctttttgctaccaagatcttgtttagaactgaacatttccaagtctgtaaccagagaagatgctcctcattttctgaaggagcagcaaagaaaatctgaagagttttcgacctctcatatgaagtacagtggccgaagcatcaagttccttctgccaccactgtcactcttgcccacgcgatctggtgtccttactatcccccaaaatcacaagtttccaaaagaaaaagaaagaaacattccaagtctcacatcttttgtgcctaagctctcagtgtctgttcgtcaatctgatgagctcagcccatcaaacgagcctccgggagccctagttaagtcgttgatggatccgactctcaggtcttctgatggcttcatttggtcaagaaacatgtgctcttttcctaagactaaccatcacaggcaatgcctggagaaggaggaaaactggaaatccaaggaaatagaagaatgtaacaaaattgaaatcactcactttgaaaaagggcagtctttggtgtcttttgagaatttgaaggaaggcaatattcctgcagttagggaagaggatattgactgccatggtagtaaaacgcgaaaacctgaagaagagaactctcaatatctttcatcaagaaagaatgagagttcagtagccaaaaactatgaacaagatccagaaatagtatgtaccattccaagcaagttccaagaaacccagcattcagaaataactccaagccaggatgaagagatgagaaataataaagctgcttcaaaaagagtttcattacataaaaatgaagcaatggaaccaaacaatattttagaagagtgtactgtacttaaaagcttatccagtgtagtctttgatgaccccattgataaactcccagaaggttgtagcagcatggagacaaacataaaaatatcaatagcagaaagagccaaaccagaaatgagtaggatggtgcctcttatccacatcaccttccctgtggatggaagccccaaggaaccagtgatagccaaaccaagcctccaaacaagaaagggaaccattcataacaaccatagtgtcaacatacctgtacaccaagaaaatgacaagcataagatgaattcccataggagtaagttggattcaaagaccaagacaagtaagaagacacctcagaattttgtgatttctactgaaggtcccattaagcctaccatgcataaaaccagcataaaaacacaaattttcccggctttgggacttgtggaccccaggccttggcaattgcccaggtttcaaaagaaaatgccacagatagcaaagaagcaatcaactcaccggactcagaaacctaaaaagcaatcatttccttgcatctgtaaaaatccaggaacacagaagtcatgtgttcctctctctgttcaaccgacagagccaagactaaattacctagatcttaagtatagtgatatgttcaaagaaatcaattcaactgctaatggacctggaatctatgaaatgtttgggacccctgtttattgtcatgtgcgagagactgaaagggatgaaaacacgtattaccgtgagatatgttcggctccatcaggcagacgtatcaccaataaatgtcgatcttcacacagtgagaggaagagcaatatcagaacaagactttctcagaaaaaaacacatatgaaatgcccaaagacttcatttggcattaaacaagagcacaaagtcttaatttctaaagaaaagagttccaaggctgtacatagcaacctacatgacattgaaaatggtgatggtatttcagaaccagactggcagataaagtcttcaggaaatgagtttctatcttccaaagatgaaattcatcccatgaacttggctcagacacctgagcagtccatgaaacagaatgaattccctcctgtctcagatttatccattgttgaagaagtttctatggaagagtctactggtgatagagacatttctaacaatcaaatactcaccacaagcctcagagatctgcaagaacttgaagagctacatcaccagatcccatttatcccttcagaagacagctgggcagtgcccagtgagaagaattctaacaagtatgtacagcaagaaaagcagaatacagcatctcttagtaaagtaaatgccagccgaattttaactaatgatctagagtttgatagtgtttcagatcactctaaaacacttacaaatttctctttccaagcaaaacaagaaagtgcatcttcccagacatatcaatattgggtacattatttggatcatgatagtttagcaaataagtcaatcacatatcaaatgtttggaaaaaccttaagtggcacaaattcaatttcccaagaaattatggactctgtaaataatgaagaattgacagatgaactattaggttgtctagctgcagaattattagctcttgatgagaaagataacaactcttgccaaaaaatggcaaatgaaacagatcctgaaaacctaaatcttgtcctcagatggagaggaagtaccccaaaagaaatgggcagagagacaacaaaagtcaaaatacagaggcatagtagtgggctcaggatatatgacagggaggagaaatttctcatctcaaatgaaaagaagatattttctgaaaatagtttaaagtctgaagaacctatcctatggaccaagggtgagattcttggaaagggagcctacggcacagtatactgtggtctcactagtcaaggacagctaatagctgtaaaacaggtggctttggatacctctaataaattagctgctgaaaaggaataccggaaactacaggaagaagtagatttgctcaaagcactgaaacatgtcaacattgtggcctatttggggacatgcttgcaagagaacactgtgagcattttcatggagtttgttcctggtggctcaatctctagtattataaaccgttttgggccattgcctgagatggtgttctgtaaatatacgaaacaaatacttcaaggtgttgcttatctccatgagaactgtgtggtacatcgcgatatcaaaggaaataatgttatgctcatgccaactggaataataaagctgattgactttggctgtgccaggcgtttggcctgggcaggtttaaatggcacccacagtgacatgcttaagtccatgcatgggactccatattggatggccccagaagtcatcaatgagtctggctatggacggaaatcagatatctggagcattggttgtactgtgtttgagatggctacagggaagcctccactggcttccatggacaggatggccgccatgttttacatcggagcacaccgagggctgatgcctcctttaccagaccacttctcagaaaatgcagcagactttgtgcgcatgtgcctgaccagggaccagcatgagcgaccttctgctctccagctcctgaagcactccttcttggagagaagtcactgaatatacatcaagactttcttcccagttccactgcagatgctcccttgcttaattgtggggaatgatggctaagggatctttgtttccccactgaaaattcagtctaacccagtttaagcagatcctatggagtcattaactgaaagt

SEQ ID NO: 130 - DNA, 875 bp, Homo sapiens
ggcgcggcgggtgcggttcagtcggtcggcggcggcagcggaggaggaggaggaggaggaggatgaggaggatgaggaggatgtgggccacgcaggggctggcggtggcgctggctctgagcgtgctgccgggcagccgggcgctgcggccgggcgactgcgaagtttgtatttcttatctgggaagattttaccaggacctcaaagacagagatgtcacattctcaccagccactattgaaaacgaacttataaagttctgccgggaagcaagaggcaaagagaatcggttgtgctactatatcggggccacagatgatgcagccaccaaaatcatcaatgaggtatcaaagcctctggcccaccacatccctgtggagaagatctgtgagaagcttaagaagaaggacagccagatatgtgagcttaagtatgacaagcagatcgacctgagcacagtggacctgaagaagctccgagttaaagagctgaagaagattctggatgactggggggagacatgcaaaggctgtgcagaaaagtctgactacatccggaagataaatgaactgatgcctaaatatgcccccaaggcagccagtgcacggaccgatttgtagtctgctcaatctctgttgcacctgagggggaaaaaacagttcaactgcttactcccaaaacagcctttttgtaatttattttttaagtgggctcctgacaatactgtatcagatgtgaagcctggagctttcctgatgatgctggccctacagtacccccatgaggggattcccttccttctgttgctggtgtactctaggacttcaaagtgtgtctgggatttttttattaaagaaaaaaaatttctagctgtc

SEQ ID NO: 131 - DNA, 1636 bp, Homo sapiens; identical to SEQ ID NO: 98

SEQ ID NO: 132 - DNA, 2459 bp, Homo sapiens
tcgacccacgcgtccggacaaggaggaggaggaggaggaggtctggctagctgtccctaacgtcatttcctggtctcaactctttaagaccctgacatactctgagattggagtgaagatttctgtgacatgctgggtatctctgcattagccagattggacatatgtaaagggacatcagtatatctggatcatcagattgtgcttcaagaagaccatagggaagaacgcattttcatcttgctgcaaaagttgcaatagaagatctgaaggtttgaatgggccaatgagtatcctcatcattgaagcattctatggaggctcccataaacagctggtggatcttcttcaagaagagttaggagactgtgtcgtttatacccttcctgcaaagaaatggcattggagagcccggacatctgctttatatttctctcagaccattcccatcagtgagcattacaggaccctctttgcaagttcagtgcttaacctgaccgaactggctgcccttcggcctgaccttgggaaactgaaaaagattctgtattttcacgagaaccagttgatatatcctgtcaagaaatgtcaggagagggatttccaatatggatacaaccaaattctttcatgcctggtggctgatgtggttgtattcaactcagtttttaatatggaatcatttctcacttccatgggaaaatttatgaagctgattcctgatcacagacccaaggatctggaaagcatcatcagacccaagtgccaagttatttactttcccatcaggtttcctgatgtgagcagattcatgcccaagcacaaaacaacccatttaaagaagatgctcggccttaaaggaaatggcggtgcggttctgtccatggcccttccttttcagccagagcagagagattcagaggatttattgaagaattttaattcagagtgtgatacacactgtggccttgatactgcacgacaagaatatttgggtaactcattaagacaggaatcagacttgaaaaaatccacctcgtcagataattcaagctctcatcatggtgaaaataaacaaaatctgactgttgatccctgtgacattttgggtggagttgataatcagcaaagactgctacacattgtctggcctcacaggtggttggaagctgtgtactgtgggtgttacccactttgtcctaaagatttggtttatcccgaaatatttccagctgaatatctgtattctacacctgaacagctttcaaaaaggctccagaatttctgcaagagaccagatattataagaaaacatctctataagggtgaaatcgctccgttttcttgggcagccctacatggtaaattcaggtctctgcttacaacagaacctagggaagatttgtgacagatggggctaagtcacaaacttgcagcctaaggcagaatctgaagaactttccagagtgtgcccatatttacctgatcagagagaaaagaaaatctgcagaggaagctgagcctggctgcttgtcatagctgacacagagccatctgccacaaacctgtggcggcttcagatctccaatccctgccaccaccccaactcaaattaaatacagattcctagagacgttatgatggttacacatgtcctcggcatcacatgtaggagactgttcaaaaaaaatatgtggcctgttgtataaccgcactcatgtatcccatatgtggtgccacattgaatttccggttgaatccgtttttatcctttgtactggatgacatggtgcctgaattctttcttttcgccgacacgatggcagccaaactgcagcttcaaacgctcacacttggctgggtttctacctaggttgccaggttatcatcggagccttcttgtgtcctcaaagggccacgaggcctgaaaggaggatcagaatgctttgggattaattgggcagccatcgcagaattgtttgtgggcaaagggctgctttagcacttttcttttagcaaattaatgactctcaggcacagggggttttaagtgaaggtattaataagaggtctggcaggtattcccatgattcacagagttacatttgcatttaattaatcttaaagttgcaagataaacagctgtaattcggacaaacatgacaaacacagtgaagccaactatcccataaaatgaacactgacatacttgttttaatttttttcccagcgtaaaaatagaaaaatcaaaatactcctaacaaaaccagtgattttgatagaaatatttctccaatatacttgcatccacctacaaatataaccttttcaagataaatcgcttatgatttcaatagtcaaactgctgtgtttgttgatgtaaagatgttttgaatggctagatggtaaaataaattcttaataaagtacccactgcaatttttaaaaaaaaaaaaaaa

SEQ ID NO: 133 - DNA, 2441 bp, Homo sapiens
atgtccaagcggcaccggttggacctaggggaggattacccctctggcaagaagcgtgcggggaccgatgggaaggatcgagatcgagaccgggatcgtgaagatcggtctaaagatcgagaccgagaacgtgatagaggagatagagagcgagagagggagaaagaaaaggagaaggagttgcgagcttcaacaaatgctatgcttatcagtgctggattaccacctttgaaagcttcccattcagctcactcaacccactcagcacattcaacgcattctacacattctgctcattcaacgcatgccggacatgcaggtcacacgtcacttccacagtgcattaatccgttcaccaacttaccccatactcctcgatactatgatattctaaagaaacgtcttcagctccctgtttgggaatacaaggataggtttacagatattctggttagacatcagtcctttgtactggttggtgagactgggtctggtaaaacaacacagattccacagtggtgtgtggagtacatgcgatcattaccaggacccaagagaggagttgcctgtacccaacccaggagagtggctgcaatgagtgtggctcagagagttgctgatgagatggatgtgatgttgggccaggaggttggttactccattcgatttgaagactgcagtagtgcaaaaaccattcttaagtatatgactgatgggatgttacttcgtgaagctatgaatgatcccctcctggagcgttatggtgtaataattcttgatgaggctcatgagaggacactggctacagatattctaatgggtgttctgaaggaagttgtaagacagagatcagatttaaaggttatagttatgagcgctactctagatgcaggaaaattccagatttactttgataactgtcctctcctaactattcctgggcgtacacatcctgttgagatcttctatactccagaaccagagagagattatcttgaagcagcaattcgaacagttatccagattcatatgtgtgaagaggaagagggagatcttcttcttttcttaactggtcaagaggaaattgatgaagcctgtaagagaataaagcgtgaagttgatgatttgggccctgaagttggtgacattaaaatcattccattgtattctacacttccacctcagcagcagcaacgcatttttgagcctccacctcccaaaaaacagaatggagcaattggaagaaaggtagttgtgtcaactaacatagcagagacgtctttgacaatagatggtgtggtgtttgtgattgatcctggatttgcgaaacagaaggtctacaatcctcgaatcagagttgagtcccttttggtgacagctattagtaaagcttcagctcagcaaagggctggtcgagctggacgtaccagacctggaaaatgcttcagactttacacagagaaagcttataaaacagaaatgcaggataacacctatcctgagattttgcgttctaatttaggatcagttgtgttacaattgaagaaacttggtattgatgacttggtacattttgattttatggatccaccagctcctgaaactctgatgagagccctggaacttttgaattacctggctgctttaaatgatgatggagatctgactgaattgggatccatgatggcagagtttcctctagatccacagctcgcaaaaatggttattgcaagttgtgactacaactgttctaatgaggtcctatctattactgctatgttgtcagtcccacagtgttttgttcgccccacggaggccaagaaagccgcagatgaggccaagatgagatttgcccacatagatggagatcatctgacactgctgaacgtctaccatgcttttaaacaaaatcatgaatcggttcagtggtgttatgacaacttcattaactacaggtccctgatgtccgcagacaatgtacgccagcagctatctcgaattatggacagatttaatttgcctcgtcgaagtactgactttacaagcagggactattatattaatataagaaaagctttggttactgggtattttatgcaggtggcacatttagaacgaacagggcattacttaactgtgaaagataaccaggtggttcagttgcatccctctactgttcttgaccacaaacctgaatgggtgctttataatgagtttgttctaacaacaaagaattacatccggacatgtacagatatcaagccagaatggttggtgaaaattgcccctcaatattatgacatgagcaatttcccacagtgtgaagcaaagagacagttggaccgcatcattgccaaacttcaatccaaggaatattcacagtactgaattcagtgcttagaactgaagttattgagaggacagctttaaaagatgaatga

SEQ ID NO: 134 - DNA, 5128 bp, Homo sapiens
gcgggcggtgctggagcgccaagtggcgctggagaaccggcgcttcctttcgccgcttccgccgccatctccgcgtttgtggggcgggaaagagggagggggctagcggctgcagctggagcgggcttctctccggggacggtcctttcctccctgctctccttttccttctttccgcgttgccgccgcccgccccctgcgcctccccgcggagcctgggtccgggagggggaaggtaggggcggcggggggcgggagagtctggcgagcggacgctagctctgaggaaactcatcaatccgtgagccccggagtccggggtgcacatcggcccagccgcagcgtcggcggcggcggcggcagcagcacgaaggggctcagtcggggtaggcgggggcggtgccggtgccgcgggggcgggcccgaccgtcccgcccagaagttgtagggcttggctcctcgcgatcttgttcctttcccctccgcttctctgacctagctgcgcggccccggcccgggagctgccgaacccgcgcctcccctgggtgaggaggacacgcctgccctcgtcgagaaaacttttcctgccgactcagttggggcggcggtggcaggaagtgcgggcagcgacctctcctccgcctgccccgcgcgccctgccggaggtcggcgctgagcttgcgatcaagtttgtgggggccccccttcccagttgccggcgagtctcgcctcgagaggggcgcccgaccccggggagggcggcaggccagggcgaaggccaagggcgtgtggtggcgccggagactaggtgcggagcaaggcggggactcgcacccgcatccgagagcgcggaggtcgcgcagcccgggagaagggagcctccggcggctgcttcctagagtccacagtgcgctgtctcctttggctgaggagagtgtcctggccccgagtctatcgaggaaaatgaagttaagccgccagttcaccgtgttcggcagtgcgatcttctgtgtggtgattttctcgctctacctgatgctggaccggggtcacttagactaccccaggaacccgcgccgcgagggctccttccctcagggccagctctcaatgttgcaagaaaaaatagaccatttggagcgtttgctagctgagaataatgagatcatctcaaatattagagactcagtcatcaatttgagtgagtctgtggaggatggtccgaaaagttcacaaagcaatttcagccaaggtgctggctcacatcttctgccctcacaattatccctctcagttgacactgcagactgtctgtttgcttcacaaagtggaagtcacaattcagatgtgcagatgttggatgtttacagtctaatttcttttgacaatccagatggtggagtttggaagcaaggatttgacattacttatgaatctaatgaatgggacactgaaccccttcaagtctttgtggtgcctcattcccataacgacccaggttggttgaagactttcaatgactactttagagacaagactcagtatatttttaataacatggtcctaaagctgaaagaagactcacggaggaagtttatttggtctgagatctcttacctttcaaagtggtgggatattatagatattcagaagaaggatgctgttaaaagtttaatagaaaatggtcagcttgaaattgtgacaggtggctgggttatgcctgatgaagctactccacattattttgccttaattgatcaactaattgaaggacatcagtggctggaaaataatataggagtgaaacctcggtccggctgggctattgatccctttggacactcaccaacaatggcttatcttctaaaccgtgctggactttctcacatgcttatccagagagttcattatgcagttaaaaaacactttgcactgcataaaacattggagtttttttggagacagaattgggatctgggatctgtcacagatattttatgccacatgatgcccttctacagctatgacatccctcacacttgtggacctgatcctaaaatatgctgccagtttgattttaaacgtcttcctggaggcagatttggttgtccctggggagtccccccagaaacaatacatcctggaaatgtccaaagcagggctcggatgctactagatcagtaccgaaagaagtcaaagctttttcgtaccaaagttctcctggctccactaggagatgatttccgctactgtgaatacacggaatgggatttacagtttaagaattatcagcagctttttgattatatgaattctcagtccaagtttaaagttaagatacagtttggaactttatcagatttttttgatgcgctggataaagcagatgaaactcagagagacaagggccaatcgatgttccctgttttaagtggagattttttcacttatgccgatcgagatgatcattactggagtggctattttacatccagacccttttacaaacgaatggacagaatcatggaatctcatttaagggctgctgaaattctttactatttcgccctgagacaagctcacaaatacaagataaataaatttctctcatcatcactttacacggcactgacagaagccagaaggaatttgggactgtttcaacatcatgatgctatcacaggaactgcaaaagactgggtggttgtggattatggtaccagactttttcattcgttaatggttttggagaagataattggaaattctgcatttcttcttattttgaaggacaaactcacatacgactcttactctcctgataccttcctggagatggatttgaaacaaaaatcacaagattctctgccacaaaaaaatataataaggctgagtgcggagccaaggtaccttgtggtctataatcctttagaacaagaccgaatctcgttggtctcagtctatgtgagttccccgacagtgcaagtgttctctgcttcaggaaaacctgtggaagttcaagtcagcgcagtttgggatacagcaaatactatttcagaaacagcctatgagatctcttttcgagcacatataccgccattgggactgaaagtgtataagattttggaatcagcaagttcaaattcacatttagctgattatgtcttgtataagaataaagtagaagatagcggaattttcaccataaagaatatgataaatactgaagaaggtataacactagagaactcctttgttttacttcggtttgatcaaactggacttatgaagcaaatgatgactaaagaagatggtaaacaccatgaagtaaatgtgcaattttcatggtatggaaccacaattaaaagagacaaaagtggtgcctacctcttcttacctgatggtaatgccaagccttatgtttacacaacaccgccctttgtcagagtgacacatggaaggatttattcggaagtgacttgcttttttgaccatgttactcatagagtccgactataccacatacagggaatagaaggacagtctgtggaagtttccaatattgtggacatccgaaaagtatataaccgtgagattgcaatgaaaatttcttctgatataaaaagccaaaatagattttatactgacctaaatgggtaccagattcaacctagaatgacactgagcaaattgcctcttcaagcaaatgtctatcccatgaccacaatggcctatatccaggatgccaaacatcgtttgacactgctctctgctcagtcattaggggtttcgagtttgaatagtggtcagattgaagttatcatggatcgaagactcatgcaagatgataatcgtggccttgagcaaggtatccaggataacaagattacagctaatctatttcgaatactactagaaaaaagaagtgctgttaatacggaagaagaaaagaagtcggtcagttatccttctctccttagccacataacttcttctctcatgaatcatccagtcattccaatggcaaataagttctcctcacctacccttgagctgcaaggtgaattctctccattacagtcatctttgccttgtgacattcatctggttaatttgagaacaatacagtcaaaggtgggcaatgggcactccaatgaggcagccttgatcctccacagaaaagggtttgattgtcggttctctagcaaaggcacagggctgttttgttctactactcagggaaagatattggtacagaaacttttaaacaagtttattgtcgaaagtctcacaccttcatcactatccttgatgcattcacctcccggcactcagaatataagtgagatcaacttgagtccaatggaaatcagcacattccgaatccagttgaggtgaacctgactttcacatttggattgagaatcattggcttttatacctttcttggtttgacgtgcaataaagaagcacattattttagcttctggctactgtgagaacatgaattctgtgattctgtgggttttttcttttttcttttaccagtacagtaagaaaaaaaaaaaaaaaaaaaaagccatgctatcaatcaagattctttttttttaaactttctcccatgaactaccaccatcagtatgaattgatgcaacaaatgaagaaatatttaaagacagcctctcaacagattgtatctcaggttaaatgctaactaattatgtctgtgttgggggttgcgaagagattcttaaaagtatctgtgtgttgatcatcagttttacaaaaacacctatttggctgaaatggaataaaatgtttgtgggtaaaagctaatggccaaaatggttgcaatcattcatactagttagaaaaattatgtgttgaaataagtggaaaagtgcaatccatccacccttatgattaacgtagatgatttttatacctttttctgatgtacctcttgaccttctccttcccttcctaccctttctaagtatttccagaaatacctgattttgaatcattcaacagtagaaaaagaggcatattttcattacttgacaatgtgggatgggtgcaatttattccatcttcactaaaatagaagcaattccataggtaccat

SEQ ID NO: 135 - DNA, 2175 bp, Homo sapiens
agatgctcgcctccgcgcgtttccgcttccgccatcgcggacgcagcctcgtgccgggagtcgccgcattgtggtccgcttctctgcactatgtcgggtggcctcctgaaggcgctgcgcagcgactcctacgtggagctgagccagtaccgggaccagcacttccggggtgacaatgaagaacaagaaaaattactgaagaaaagctgtacgttatatgttggaaatctttctttttacacaactgaagaacaaatctatgaactcttcagcaaaagtggtgacataaagaaaatcattatgggtctggataaaatgaagaaaacagcatgtggattctgttttgtggaatattactcacgcgcagatgcggaaaacgccatgcggtacataaatgggacgcgtctggatgaccgaatcattcgcacagactgggacgcaggctttaaggagggcaggcaatacggccgtgggcgatctgggggccaggttcgggatgagtatcggcaggactacgatgctgggagaggaggctatggaaaactggcacagaaccagtgagtggtgagagctctgtcagtgacaaacactcctttggcctgttgaatttgctgaagaacatcacctaaagtctgcacacgagcccatttttaccaagatttgatcagtgtctttactgagctggaagcctctgaaagttattaaaggacagaatccaaaagaatgcctttaattcttgtctgagaatcttggccatgtgtcagattatcagaacaattttgttaccaggtcagaaattgtgttctttgacaacagattggatctgtaatgttgattagtctttagccataaccactacacttttagaaagacagaaaaatgtaagaatttgtttttaccataatgagtcttaagtaggttcatgatctacattggggcctgggattatttttttaattttaagtttgcatgagatagcctaataaatggaggtggggccaggcatggtggctcacacgtgtaatcccaacactttgggaggctgaggaggaaggatagcttgaggccaggagtttgagactagactgggcaacatagcaagaccccgtctctacaaagcacaacgaaaaacaacaaatggagttgtgctatgttgtattgctttgcacaaaattaggaacaggtgtttgacaattgaatttgttttctgtgaattctaacctctaaaggcatgcttagaggtcaaggaccttcctgtgtagttggtgcaaaagcaatctccacaggacagcactgcttccatgcttcatacatcaggaaatgaggccagaacttgagtatttactaacacgtttttcaaaagatgtcagtgttatacctaaagctaaaaaaaagcaagggtttgtcatagagggaacctctaaataatttcaggggtaggggagatgttgtcaataggaaatgggataaaatatcaagagacaatgaaaacactgccttgacatgaggaccagcaagtttattcttttcattttcagtgatgttgggaatggactgggttttaaaagggagcttgaagagggaatgtttgacagtcacagaaggttcctgcagcagatgcctcttttagccatttctcatttttttcctcaaattttacctactgaggctcaagccttcacagtgagctgatggtctctacagggaggggagtctagggaatttatttggtatttgtaaggcaagaggtgatttctctctaatatatctgagttattgctcatttaaaactgttaagtccagtataattttccctgatatgaaaaaatgtgcatttttttcacttagcaacaaagtaccttctaatttccaatagtccgtgaaagttggggctgaagtacctaagtgtgaatgtctctcccgttaaactgagtgtagaaatctgaatttttaaaagagctgtaactagttgtaagtgcttaggaagaaactttgcaaacatttaatgaggatacactgttcatttttaaaattccttcacactgtaatttaatgtgttttatattcttttgtagtaaaacaacataactcagatttctacaggagacagtggttttatttggattgtcttctgtaataggtttcaataaagctggatgaacttatcgttaaaaa

SEQ ID NO: 136 - DNA, 1015 bp, Homo sapiens
gagaacgaaagatggcggcgcccgtaaggcggacgctgttaggggtggcggggggttggcggcggttcgagaggctctgggccggcagtctaagctctcgcagcctggctcttgcagccgcaccctcaagcaacggatccccatggcgcttgttgggcgcgttgtgcctgcagcggccacctgtagtctccaagccgttgaccccattgcaggaagagatggcgtctctactgcagcagattgagatagagagaagcctgtattcagaccacgagcttcgtgctctggatgaaaaccagcgactggcaaagaagaaagctgaccttcatgatgaagaagatgaacaggatatattgctggcgcaagatttggaagatatgtgggagcagaaatttctacagttcaaacttggagctcgcataacagaagctgatgaaaagaatgaccgaacatccctgaacaggaagctagacaggaaccttgtcctgttagtcagagagaagtttggagaccaggatgtttggatactgccccaggcagagtggcagcctggggagacccttcgaggaacagctgaacgaaccctggccacactctcagaaaacaacatggaagccaagttcctaggaaatgcaccctgtgggcactacacattcaagttcccccaggcaatgcggacagagagtaacctcggagccaaggtgttcttcttcaaagcactgctattaactggagacttttcccaggctgggaataagggccatcatgtgtgggtcactaaggatgagctgggtgactatttgaaaccaaaatacctggcccaagttaggaggtttgtttcagacctctgatgggccgagctgcctgtggacggtgctcagacaagtctgggattagagcctcaaggacattgtgtgattgcctcacatttgcaggtaatatcaagcagcaaactaaattctgagaaataaacgagtctattactaaaaaaaaaaaaaaaaaaaaaaaaaaaaaa

SEQ ID NO: 137 - DNA, 2663 bp, Homo sapiens
cgcgcgcgccatttctagtcgttttcaaagcgcctcgcgctgattctcacgggcccggctgccggcccccgctctgccctgcataataaaatggctaatcaggtgaatggtaatgcggtacagttaaaagaagaggaagaaccaatggatacttccagtgtaactcacacagaacactacaagacactgatagaggcaggcctcccacagaaggtggcagaaagacttgatgaaatatttcagacaggattggtagcttatgtcgatcttgatgaaagagcaattgatgctctcagggaatttaatgaagaaggagctctgtctgtactacagcagttcaaggaaagtgacttatcacatgttcagaacaaaagtgcatttttatgtggagttatgaagacctacaggcagagagagaaacaggggagcaaggtgcaagagtccacaaagggacctgatgaagcgaagatcaaggccttgcttgagagaactggttatactctggatgtaaccacaggacagaggaagtatggtggtcctccaccagacagtgtgtactctggcgtgcaacctggaattggaacggaggtatttgtaggcaaaataccaagggatttatatgaggatgagttggtgcccctttttgagaaggccggacccatttgggatctacgtcttatgatggatccactgtccggtcagaatagagggtatgcatttatcaccttctgtggaaaggaagctgcacaggaagccgtgaaactgtgtgacagctatgaaattcgccctggtaaacaccttggagtgtgcatttctgtggcaaacaacagactttttgttggatccattccgaagaataagactaaagaaaacattttggaagaattcagtaaagtcacagagggtttggtggacgttattctctatcatcaacccgatgacaaaaagaagaatcgggggttctgcttccttgaatatgaggatcacaagtcagcagcacaagccagacgccggctgatgagtggaaaagtaaaagtgtggggaaatgtagttacagttgaatgggctgaccctgtggaagaaccagatccagaagtcatggctaaggtaaaagttttgtttgtgagaaacttggctactacggtgacagaagaaatattggaaaagtcattttctgaatttggaaaactcgaaagagtaaagaagttgaaagattatgcatttgttcattttgaagacagaggagcagctgttaaggctatggatgaaatgaatggcaaagaaatagaaggggaagaaattgaaatagtcttagccaagccaccagacaagaaaaggaaagagcgccaagctgctagacaggcctccagaagcactgcgtatgaagattattactaccaccctcctcctcgcatgccacctccaattagaggtcggggtcgtggtggggggagaggtggatatggctaccctccagattactacggctatgaagattactatgatgattactatggttatgattatcacgactatcgtggaggctatgaagatccctactacggctatgatgatggctatgcagtaagaggaagaggaggaggaaggggagggcgaggtgctccaccaccaccaagggggaggggagcaccacctccaagaggtagagctggctattcacagaggggggcacctttgggaccaccaagaggctctaggggtggcagagggggtcctgctcaacagcagagaggccgtggttcccgtggatctcggggcaatcgtgggggcaatgtaggaggcaagagaaaggcagatgggtacaaccagcctgattccaagcgtcgtcagaccaacaaccaacagaactggggttcccaacccatcgctcagcagccgcttcagcaaggtggtgactattctggtaactatggttacaataatgacaaccaggaattttatcaggatacttatgggcaacagtggaagtagacaagtaagggcttgaaaatgatactggcaagatacgattggctctagatctacattcttcaaaaaaaaaaattggcttaactgtttcatctttaagtagcattttgctgccatttgtattgggctgaagaaatcactattgtgtatatactcaagtctttttatttttcctcttttcataaatgctcttggacattattgggcttgcagagttcccttattctggggattacaatgcttttatcgtttcaggcttcattttagcttcaaaacaagctgggcacactgttaaatcatgattttgcagaacctttggttttggacagtttcatttttttggatttgggatagattacataggagtatggagtatgctgtaaataaaaatacaagctagtgctttgtcttagtagttttaagaaattaaagcaaacaaatttaagttttcttgtattgaaaataacctatgattgtatgttttgcattcctagaagtaggttaactgtgtttttaaattgttataacttcacacctttttgaaatctgccctacaaaatttgtttggcttaaacgtcaaaagccgtgacaatttgttctttgatgtgattgtatttccaatttcttgttcatgtaagatttcaataaaactaaaaaatctattcaaaacatta

SEQ ID NO: 138 - DNA, 699 bp, Homo sapiens
ggagacacataacctcgattttcttccgccatccggctaaatagtcccatgtgcactttgttccatggataaataaacactaggaacgcatttccaccctagatttcagcagaaatgctgaatgtaaaggaatatttgagtaaagtgagttgccgttcttgaagcccgtctcctaaggattctcccggtgtccgcgtagggatctcatgctatataggagggccctgccaggcaccgtctcctctctccggtccgtgcctccaagatgacaaagaaaagaaggaacaatggtcgtgccaaaaagggccgcggccacgtgcagcctattcgctgcactaactgtgcccgatgcgtgcccaaggacaaggccattaagaaattcgtcattcgaaacatagtggaggccgcagcagtcagggacatttctgaagcgagcgtcttcgatgcctatgtgcttcccaagctgtatgtgaagctacattactgtgtgagttgtgcaattcacagcaaagtagtcaggaatcgatctcgtgaagcccgcaaggaccgaacacccccaccccgatttagacctgcgggtgctgccccacgtcccccaccaaagcccatgtaaggagctgagttcttaaagactgaagacaggctattctctggagaaaaataaaatggaaattgtacttaaaaaaaaaaaaaaaaaaa

SEQ ID NO: 139 - DNA, 4308 bp, Homo sapiens
gctggccccgccccctagcgccgcggtcggagccatttcgccgattcctccatgcgagttgctgtgcgtttctctgttgtctcggtagaaggccagagtcacacacggtcctaagagctgggcaccaggaagcgaaggctgatctgaagaagacacttgaatcatgggtgacgttaaaaattttctgtatgcctggtgtggcaaaaggaagatgaccccatcctatgaaattagagcagtggggaacaaaaacaggcagaaattcatgtgtgaggttcaggtggaaggttataattacactggcatgggaaattccaccaataaaaaagatgcacaaagcaatgctgccagagactttgttaactatttggttcgaataaatgaaataaagagtgaagaagttccagcttttggggtagcatctccgcccccacttactgatactcctgacactacagcaaatgctgaaggagatttaccaacaaccatgggaggacctcttcctccacatctggctctcaaagcagaaaataattctgaggtaggggcctctggctatggtgttcctgggcccacctgggaccgaggagccaacttgaaggattactactcaagaaaggaagaacaagaagtgcaagcgactctagaatcagaagaagtggatttaaatgctgggcttcatggaaactggaccttggaaaatgctaaagctcgtctaaaccaatattttcagaaagaaaagatccaaggagaatataagtacacccaagtgggtcctgatcacaacaggagctttattgcagaaatgaccatttatatcaagcagctgggcagaaggatttttgcacgagaacatggatcaaataagaaattggcagcacagtcctgtgccctgtcacttgtcagacaactgtaccatcttggagtggttgaagcttactccggacttacaaagaagaaggaaggagagacagtggagccttacaaagtaaacctctctcaagatttagagcatcagctgcaaaacatcattcaagagctaaatcttgagattttgcccccgcctgaagatccttctgtgccagttgcactcaacattggcaaattggctcagttcgaaccatctcagcgacaaaaccaagtgggtgtggttccttggtcacctccacaatccaactggaatccttggactagtagcaacattgatgaggggcctctggcttttgctactccagagcaaataagcatggacctcaagaatgaattgatgtaccagttggaacaggatcatgatttgcaagcaatcttgcaggagagagagttactgcctgtgaagaaatttgaaagtgagattctggaagcaatcagccaaaattcagttgtcattattagaggggctactggatgtgggaaaaccacacaggttccccagttcattctagatgactttatccagaatgaccgagcagcagagtgtaacatcgtagtaactcagcccagaagaatcagtgcggtttctgtggcagagcgagttgcatttgaaagaggagaagagcctggaaaaagctgtggctacagcgttcgatttgagtctatacttcctcgtcctcatgccagtataatgttttgtactgtaggtgtgctcctgagaaaattagaagcaggcattcgaggaatcagtcatgtaattgtagatgaaatacatgaaagagatattaatactgacttccttttggtagtactgcgtgatgttgttcaggcttatcctgaagttcgcattgttcttatgtctgctactattgataccagcatgttttgtgaatatttcttcaattgccccatcattgaagtttatgggaggacttacccagttcaagaatattttctggaagactgcattcagatgacccactttgttcctccaccaaaagacaaaaagaagaaggataaggatgatgatggtggtgaggatgatgatgcaaattgcaacttgatctgtggtgatgaatatggtccagaaacaaggttgagcatgtctcaattgaacgaaaaggaaactccttttgaactcatcgaggctctacttaagtacattgaaacccttaatgttcctggagctgtgttggtttttttgcctggctggaatctgatttatactatgcagaagcatttggaaatgaatccacattttggaagccatcggtatcagattctacccctgcattctcagattcctcgagaggaacagcgcaaagtgtttgatccagtaccagttggagtaaccaaggttattttgtccacaaatattgctgaaacaagcattaccataaacgatgttgtttatgtcattgactcctgcaagcagaaagtgaaactcttcactgctcacaacaatatgaccaactatgctaccgtatgggcatcaaaaacaaaccttgagcaacggaaagggcgagctggccgagtacggcctggattctgctttcacctgtgcagccgagctcgttttgagagacttgaaacccacatgacaccagagatgttccgaacaccattgcatgaaattgctcttagcataaaacttctgcgtctaggaggaattggccaatttctggccaaagcaattgaacctccccctttggatgctgtgattgaagcagaacacactcttagagagcttgatgcattagatgccaatgatgagttgactcctttgggacgaatcctggctaaactccccattgagcctcgttttggcaaaatgatgataatggggtgtattttctacgtgggagatgctatctgtaccattgctgctgctacctgctttccagagcctttcatcaatgaaggaaagcggctgggctatatccatcgaaattttgctggaaacagattttctgatcacgtagcccttttatcagtattccaagcctgggatgatgctagaatgggtggagaagaagcagagatacgtttttgtgagcacaaaagacttaatatggctacactaagaatgacctgggaagccaaagttcagctcaaagagattttgattaattctgggtttccagaagattgtttgttgacacaagtgtttactaacactggaccagataataatttggatgttgttatctccctcctggcctttggtgtgtaccccaatgtatgctatcataaggaaaagaggaagattctcaccactgaagggcgtaatgcacttatccacaaatcatctgttaattgtccttttagtagccaagacatgaagtacccatctcccttctttgtatttggtgaaaagattcgaactcgagccatctctgctaaaggcatgactttagtcacccccctgcagttgcttctctttgcctccaagaaagtccaatctgatgggcagattgtgcttgtagatgactggattaaactgcaaatatctcatgaagctgctgcctgtatcactggtctccgggcagccatggaggctttggttgttgaagtaaccaaacaacctgctatcatcagccagttggaccccgtaaatgaacgtatgctgaacatgatccgtcagatctctagaccctcagctgctggtatcaaccttatgattggcagtacacggtatggagatggtccacgtcctcccaagatggcccgatacgacaatggaagcggatatagaaggggaggttctagttacagtggtggaggctatggcggtggctatagcagtggaggctatggtagcggaggctatggtggcagcgccaactcctttcgggcaggatatggtgcaggtgttggtggaggctatagaggagtttcccgaggtggctttagaggcaactctggaggagactacagagggcctagtggaggctacagaggatctgggggattccagcgaggaggtggtaggggggcctatggaactggctactttggacagggaagaggaggtggcggctattaaaacttggttatgtcagttcctgtgtgtagacagtaaggaaaaaaaggcatgctatgtgttacgtgttttttccagtatgtttatttgccaccaaaaagtaaatgcattttcacccattctgtggttcattgtagtttaaggaaaccaagcatatagatgcattagtgattttgtttatattatgtaaaatataacgatctcttaaaaataccacagtttgtattttttctttaaggagtaaagatttgcctttaaataacttggtattttcctggctttcgtttaatacaatagaaaataaagtattacaccgaaaaaaaaaaaaaaaaaaa

SEQ ID NO: 140 - DNA, 1155 bp, Homo sapiens
tgataatcatggcgcccctcggaacaactgtattgctgtggagcctcttgaggagttctccgggcgtggaacgggtctgtttccgggctcgaatccagccctggcacggtggcctgctccaaccgctaccttgctctttcgagatggggctgccacgccgccggttcagctccgaggccgcagaatctggtagcccagagaccaagaaacctacatttatggatgaggaagttcaaagcatactcacgaaaatgacaggcttgaacttgcagaagacttttaagccagctatacaagaactgaagccaccaacctataagctaatgactcaggcacagttggaagaggctacaagacaggcagttgaggcagctaaagtacgattaaaaatgccaccagttctggaagagcgagtaccaataaatgatgtgttagctgaagataagattttggaaggaacagaaacaaccaaatatgtgtttactgatatatcatatagcataccacaccgggagcgttttattgtcgtcagagaaccaagtggcacactacgcaaagcctcttgggaagaacgggaccgaatgatacaagtttatttcccaaaagaaggtcgtaaaattttgacaccaataattttcaaggaagaaaatcttaggactatgtatagccaggacaggcatgttgatgtcctcaatctctgctttgcccagtttgagccagattccacagagtatatcaaggttcatcacaagacctatgaagatatagataaacgtggaaaatatgaccttttacgttcaacaagatactttggtggaatggtgtggtattttgtaaataataaaaagattgatggtttgctgattgaccagattcagagagatttaatcgatgatgcaaccaacttggtccagctgtatcacgtgctccatccagatggccagtcggctcaaggggccaaggatcaggctgctgagggaataaatttaatcaaggtctttgcaaaaacagaagcacagaagggagcctatatagaactaacactgcagacttatcaagaagcactcagtcgccattctgcagcttcctaaaaatattttaaaaatacatttattttactaaaaaaaaaaaaaaaaaaaaaaaaaaaaaaaaaaa

SEQ ID NO: 141 - DNA, 4510 bp, Homo sapiens
cggttgcagcgtggacgccggatgagttgcttttaggcttgctggcccgcggggctgtccaggcacgcgaggcccctcaggtacgccctctcttccctgcaggatccggccctcaaagacgagggtcacgcacgcgttacaaccccgaaacagtagcacaagatttaatttttaaaagagcgtgtttcttcggggcttgccgttcgttcgtttccagcctcaggaatttatggtcgcctttttgaatgagcaacaaaatgcttcaacaagttccagaaaacataaattttcctgctgaagaagagaaaatcttggagttttggactgaatttaattgttttcaggaatgcttaaagcaatcaaaacataaaccaaaatttaccttctatgatggtcctccttttgcaactggactgcctcactatggacatatacttgcgggtacaattaaagatatagttacaagatatgctcaccagagtgggtttcatgttgacagaagatttggatgggattgccatggcttacctgtggaatatgaaattgataagacactgggaatcagaggaccagaggatgtggccaaaatggggattacagagtataacaatcagtgccgagcaattgtgatgagatattctgctgagtggaagtctactgttagcagacttggccgatggattgactttgacaatgactataaaactctgtatccacaattcatggaatcagtctggtgggtcttcaaacaactctatgataaaggccttgtttatagaggtgtgaaagtcatgcccttctctacggcatgtaacactccactttccaacttcgagtcacaccagaattataaggatgttcaagatccttcagtatttgtaactttccctttggaagaagatgaaactgtatctttagttgcttggacaaccactccctggactctacctagtaaccttgctgtgtgtgttaatccagaaatgcaatatgtgaaaattaaagatgttgccagaggacgattactcattttaatggaagccagattgtcagccctctataaattggagagtgactatgagatccttgaaagatttcctggtgcctatcttaaaggcaagaagtacaggcccctgtttgactatttcctgaagtgtaaagagaatggcgctttcactgtgcttgttgacaactatgtgaaggaagaagaaggcacaggggttgtccaccaagctccttacttcggtgctgaggactatcgggtctgtatggactttaacattattcggaaagactcactccctgtttgccctgtggatgcttcaggctgcttcacaacggaggtgacagatttcgcaggacagtatgtgaaggatgctgacaaaagtatcatcaggactttgaaggaacaaggccgacttctggttgccaccaccttcactcacagctaccctttttgctggagatcagacactcctctaatttacaaagcagtgcccagctggtttgtgcgagtggagaacatggtggaccagctcctaaggaacaatgacctgtgctactgggtcccagagttggtacgagaaaaacgatttggaaattggctgaaagatgcacgtgactggacaatttccagaaacagatactggggcacccccatcccactgtgggtcagcgatgactttgaggaggtggtatgcattgggtcagtggcggaacttgaagaactgtcaggagcaaagatctcagatctccacagagagagtgttgaccacctgaccattccttcacgctgtgggaagggatccttgcaccgcatctctgaagtgtttgactgttggtttgagagtggcagcatgccctatgctcaggttcattacccgtttgaaaacaagagggagtttgaggatgcttttcctgcagatttcattgccgagggcatcgaccaaaccagaggatggttttataccctgctggtgctggccacggccctctttggacaaccgcctttcaagaacgtaattgtgaatgggcttgtcctggcaagtgatggccaaaaaatgagcaaacggaaaaagaattatccagatccagtttccatcatccagaagtatggtgctgatgccctcagattatatctgattaactcccctgtggtgagagcagaaaacctccgctttaaagaagagggtgtgcgggacgtccttaaggatgtactgctcccatggtacaatgcctatcgcttcttaatccagaacgttctgaggctccagaaggaggaagaaatagaatttctctacaatgagaacacggttagagaaagccccaacattacagaccggtggatcctgtccttcatgcagtctctcattggcttctttgagactgaaatggcagcttataggctttatactgtggtgcctcgcctggtcaagtttgtagatattctgaccaattggtatgttagaatgaaccgcagaagattaaagggtgaaaatgggatggaggattgtgtcatggccctagaaaccttgtttagtgttctgctttctctttgcagacttatggctccctacacaccttttctcactgaattgatgtaccagaatctaaaggtgctgattgaccctgtttctgttcaggacaaggacacactcagcattcactacctcatgctgccccgtgttcgagaagaattgattgacaagaaaacagagagtgcagtatctcagatgcagtctgtgattgaacttggaagagtgatcagagaccgaaaaactattcccataaagtatcctttgaaagaaattgtggttatccatcaagatccagaagctcttaaagatatcaagtctttggagaagtatatcattgaggaactcaatgttcgaaaagttacactgtctacagataaaaacaagtatggcattcggctaagggcagaaccagatcacatggtcctggggaagcgtctgaagggagcctttaaggcagtgatgacgtccatcaagcagttgagcagtgaggagctggagcagttccagaagactgggaccattgttgtggaaggccatgaattgcacgatgaagacatccgcctcatgtacacctttgatcaggccacaggtgggactgcgcaatttgaagcacactcagatgctcaggctttggtcctcttagatgtcactcctgaccagtcaatggtagatgaaggaatggctcgggaagtcatcaatcgcatacagaaacttcgcaaaaagtgcaatctggttccaactgatgaaatcacagtgtactataaagcaaagtctgaaggaacatatctgaatagtgttattgaaagccacacagagttcatatttaccaccataaaggctcccttgaaaccatatccagtttctccatcggataaagtccttattcaagaaaaaacacagttgaagggatctgaactggaaattacactcaccagaggatcttcccttcctggtcctgcttgtgcatatgtcaatcttaacatttgtgcaaatggcagtgaacaaggtggagtattgctcctggaaaatccaaaaggtgacaataggttggaccttttaaagctgaagagtgttgtcactagcatttttggtgtgaaaaatacagagctggctgtcttccatgatgaaacagaaatacaaaaccaaactgacttactgagtcttagtggaaaaacactttgtgtgactgcaggatcggctccctctctgatcaacagttctagtactcttctttgtcagtatatcaacctacagctcctgaatgcaaagccacaagagtgtttaatggggacagtgggcactctcctgcttgaaaacccacttgggcagaatggactcacccaccaaggtcttctgtatgaagcagccaaggtgtttggccttcggagcaggaagctaaagctgtttctgaatgagacccaaacgcaggaaattacagaagacatccccgtgaagactttgaatatgaagactgtgtatgtttctgtgttaccaacaacagcagacttctagcatgtacttatcaatgttgttcggtcagcccttccctaattacacctatcccctacacatacatgcacatagacacacacatgaacacactgaagatatttccttcaggtgtgtgtaaaatatgctgcttggattgaaattcaaatgggattgattagtcaagtaacttgagacctcacagtaatcttcacacttaaccttagacacctatgcagtcatgttgggagcaggttacaatgttacttcagcccacagtttatttctatacttgagttcttaagtacagaagatagaagtgatttaaatggcatagtatatatatcattttctggccttttaaaatttatttgagacctcttgatgaaatggacatattatatatttctgccacctggattttcctggataatttgatggaatattttaagtttcagtaaatcagaacaataaacaaactcagatat

SEQ ID NO: 142 - DNA, 867 bp, Homo sapiens
ccctcactaaagggacaaaagctggagctccaccgcggtgcggccgctctagaactagtggatcccccgggctgcaggtccggtcttgtccacgctagggggtgcacgtactcccaactgtggtcgcgctctcaccccttctgctgctctcgtggccccctcgcgatggcgggcatcctgtttgaggatattttcgatgtgaaggatattgacccggaggccaagaagtttgaccgagtgtctcgactgcattgtgagagtgaatctttcaagatggatctaatcttagatgtaaacattcaaatttaccctgtagacttgggtgacaagtttcggttggtcatagctagtaccttgtatgaagatggtaccctggatgatggtgaatacaaccccactgatgataggccttccagggctgaccagtttgagtatgtaatgtatggaaaagtgtacaggattgagggagatgaaacttctactgaagcagcaacacgcctctctgcgtacgtgtcctatgggggcctgctcatgaggctgcagggggatgccaacaacctgcatggattcgaggtggactccagagtttatctcctgatgaagaagctagccttctgaacctcgcctgaagccagcctctctgccaagtcactcaggtcatgggcattgttcaagcctgagtggcagccgctcttgctcacctgttgaggaagggctggctcactgtccaccgtggcggcatctttaactggcctccactcaatgggaaactgactcgcctgtgaaagacacagtgggagagctgaaaatgaatcagaagctttatgtatatgatttttaaattaaactttactttttcagactgcc

SEQ ID NO: 143 - DNA, 1388 bp, Homo sapiens
ctggccaccaagcgcctccgtggacacgcacttcctgcgaggcctccgtgcgcaccttggccgagccgaaccgagccgagtcctgtccttccaggccgttcgcaatggtggatgagttggtgctgctgctgcacgcgctcctgatgcggcaccgcgccctgagcatcgagaacagccagctcatggaacagctgcggctgctggtgtgcgagagggccagcctgctgcgccaggtacgtccgccgagctgcccggtgcccttccccgaaacgtttaatggcgagagctcccggctccccgagtttatcgtgcagacggcgtcttacatgctcgtgaacgagaaccgattctgcaacgacgccatgaaggtggcattcctaatcagcctcctcaccggggaagccgaggagtgggtggtgccctacatcgagatggatagccccatcctaggtgattaccgggccttcctcgatgagatgaaacagtgctttggctgggatgacgacgaagacgacgacgacgaagaagaggaggatgattattaggccctcgaccctcgggcctcgggggggagggccctgcacgccgccaccccctccccgcagccctcaccccgccaggagccactgctctcccccttgccctccggtccccttacctacccgcgcccgtctgctctctctcttcatttctccgtagtgcttgtctttgttccaggaatagcgctccagttacctgctgctggggtcggggctggagcctcactcactcggaagtgcttggaagtgtcatctaccctggccatccccgggatccctcccctgctaatctgaactgtgtcctgaaccccagctattggccaggcccctgttacaaactgcgcagaccacccatagccctgctgctgccacctgccctgctgccaggcttacatcttcccagagaactatgctgccacttcacatccactcaccacatcccacctacagactaccacctttcgagatcaggaccaacctggaaaatgccagagttggctatgccttttcagacattgatttggacagctcaccaacccctgaaggggccgttcagcctggttagttttctacctactccgagtgtcctcccctgccccaccagattgctgcaggggcgcggtgtgcctggcagccaaattgttgacacttcttttttcctatgcactggttttacacagctgtcatttttctttcaaaattgcagcagtcccacagatgtgtgcatttggacaaatagtacttaaaaacaaaacaaacaagcactcagcccagctcctcaatactacctggaaaaagcattggcattattttcaataaatatcaagcactaaaaaaagaaaaaaaaaa

SEQ ID NO: 144 - DNA, 3018 bp, Homo sapiens
ataaaaccggcccggttctgtggaaagtgggcggcggagccagggtccctggaatggcggagactctgtcaggcctaggtgattctggagcggcgggcgcggcggctctgagctccgcctcgtcagagaccgggacgcggcgcctcagcgacctgcgagtgatcgatctgcgggcggagctgaggaaacggaatgtggactcgagcggcaacaagagcgttttgatggagcggctgaagaaggcaattgaagatgaaggtggtaatcctgacgaaattgaaattacctccgagggaaacaagaaaacatcaaagaggtctagcaaagggcgcaaaccagaagaagagggtgtggaagataacgggctggaggaaaactctggggatggacaggaggatgttgagaccagtctggagaacttgcaggacatcgacatcatggatatcagtgtgttggatgaagcagaaattgataatggaagcgttgcagattgtgtcgaagacgatgatgctgataacctccaggagtccctgtcggatagtagagagctagtcgagggggaaatgaaagagcttccggagcagcttcaggaacatgctatagaggacaaagaaactataaacaatttagatacttcatcatctgacttcactatattacaggaaattgaagagccatccctggagccagaaaatgagaaaatactcgacattttgggggaaacttgtaaatctgagccagtaaaagaagaaagttccgagctggagcagccatttgcacaggacacaagtagcgtggggccagacagaaagcttgcggaggaagaggacctatttgacagcgcccatccggaagagggtgatttagatttggccagcgagtcaacagcacacgctcagtcgagcaaggcagacagcctgttagcggtagtgaaaagggagcccgcggagcagccaggcgatggcgagaggacggactgtgagcctgtagggctagagccggcagttgagcagagtagtgcggcctccgagctcgcggaggcctctagcgaggagctcgcagaagcacccacggaagccccaagcccagaagccagagatagcaaagaagacgggaggaagtttgattttgacgcttgtaatgaagtccctccggctcctaaagagtcctcaaccagtgagggcgctgatcagaaaatgagttctcccgaagatgactcggatacaaaaaggctttccaaagaggaaaagggtcgcagcagttgtggtagaaatttctgggttagtggactctcttctacaaccagagctacagatttgaagaatcttttcagcaaatatgggaaggtggtgggcgccaaggttgtgacaaatgcccggagtcctggagctcgctgttacggttttgtcacgatgtccacagcagaagaggccacaaaatgcattaaccacctgcacaagacggagctccacggaaagatgatctccgtggagaaagccaaaaatgaacctgtgggaaagaaaacctctgacaaaagagacagtgacgggaaaaaggagaagtcgagcaacagtgacagatctacaaaccttaagagggatgataaatgtgacagaaaagatgatgctaagaagggtgacgacggaagtggagaaaagagtaaggaccaagatgatcagaaacctggcccctcagagcgatctcgagccacaaagtcaggaagtcgagggaccgaacggactgtagtaatggataaatccaaaggggtgcctgtgattagtgtaaaaacgtccgggtccaaagagagagcttccaaaagccaggatcgcaaatcagccagcagagagaagcggtccgtcgtgtcctttgataaggtcaaggagcctcggaagtcaagagactcagagtcccatagcagggtgcgtgaacgcagtgaacgcgaacaacgcatgcaggcgcagtgggagcgcgaggagcgtgagcggctggagattgcccgagagaggctggccttccagcgccagcggctggagcgggagcgcatggagcgggaacggctggagcgcgaacgcatgcacgtggagcacgagcgcaggcgcgagcaggagcgcatccaccgtgagcgcgaggagctgaggcgccagcaggaactgcgctatgagcaggagcggcggcccgcggtgcggcggccctacgacctggaccggcgagatgatgcctattggccggaagccaagcgggccgccctggatgagcgctaccattctgactttaaccgccaggaccgcttccacgactttgaccacagggaccgcggccgctaccccgaccactcggtggacaggagagaaggttcaaggtcaatgatgggagaacgagaaggacagcattacccagaacgccatggaggaccagagcgccacggccgggactcccgcgatggctgggggggctatggctctgacaagaggatgagcgagggccgggggctgcctcctccccccagacgtgactggggggaccatggccgaagagaggatgaccggtcatggcagggcacggccgacgggggcatgatggacagggatcacaagaggtggcaaggtggcgagagaagcatgtccggtcactccgggcctggccacatgatgaaccgaggaggaatgtcagggcgcggcagctttgccccaggcggggcctcccggggccaccccatcccacacggtggcatgcagggcgggtttggaggccagagccgggggagcaggcccagcgatgcccgcttcactcgccgctactgagtacttggaatcctgtgtcctgtctcgtggcaacaaggctatgttctgttaggagttaccttaaactgtgtaaaaatatttttttttaatctgctgccatattgtagctcaatacaatgtgaatttgtttttcgttttggggttttttttttttgtaataaatgtgtttccgttcacataccctttaaaaaaaaaaaaaaaaaaaaaaaaaaaaaaa

SEQ ID NO: 145 - DNA, 1750 bp, Homo sapiens
gcggtcttatataagccagatccgcaggggagtccgcagaagggttaaacaggtctttgggcttcggcgacctcgcccgcggcagaaaccggtaagaagacagtgggctgcgcgtctcattttcagccttgcccggactctcccaaagccggcgcccagtagtggctccagagcccacaggtggcccccggcagtctctggggcgcatggagcggcgttaatagggctggcggcgcaggccagtagccgctccaacatgaacctcgtgggcagctacgcacaccatcaccaccatcaccacccgcaccctgcgcaccccatgctccacgaacccttcctcttcggtccggcctcgcgctgtcatcaggaaaggccctacttccagagctggctgctgagcccggctgacgctgccccggacttccctgcgggcgggccgccgcccgcggccgctgcagccgccaccgcctatggtcctgacgccaggcctgggcagagccccgggcggctggaggcgcttggcggccgtcttggccggcggaaaggctcaggacccaagaaggagcggagacgcactgagagcattaacagcgcattcgcggagttgcgcgagtgcatccccaacgtgccggccgacaccaagctctccaagatcaagactctgcgcctagccaccagctacatcgcctacctgatggacgtgctggccaaggatgcacagtctggcgatcccgaggccttcaaggctgaactcaagaaggcggatggcggccgtgagagcaagcggaaaagggagctgcagcagcacgaaggttttcctcctgccctgggcccagtcgagaagaggattaaaggacgcaccggctggccgcagcaagtctgggcgctggagttaaaccagtgagccgaggcccgcgccgaggacctggccaggccagccactcctgaagccccgggaggagaggaaggcagcggcgaacgccaggctctgggctccggcgactggtgctacgcatcccgcggagcttctgctgagcgccggcaggtcgtcggctgcaaccacacacttggatcgcacgtgcaatgtcctttgattttttttaatacattaagagaaagagaaatatatatatatccacccccagcccaaccgagggcggcccttggcggcaacatgcaagaaggagggactgtcgaacccaagggctcaaagacgcactcttccacccttttggagcgaatttagaacctcagccctatctccatttccctatctggctctttctctcttgtccctccatatgatccgccccgacgccgtcttctctaattaaaatgcaataaggaatcaattcttttcttgcctgagaaagagaaccagacgcaggaagatgaaaggctgccctttgttcttcgaatcgtggtggttttattttatttttctttttgtcgctgcacttcctgtttagttccaagggaaacactttctctctttctctgtctctctcttttcttccttcttttccttcctttttgtttctatctaaataaaagctttccctgtgttggaaagtttttatgtatttaaactacctaccatgcctgttgtgctcaggtgtttgttcatcctgccatccccaacccttttctacctcaagtctgtgtgaccactcacagcccccctcccttcgccaaagcagtgtctatgctcttgattaataaaacattttctgaaatcaaaaaaaaaaaa

SEQ ID NO: 146 - DNA, 1430 bp, Homo sapiens
ctcagagtacgcacggtctgattttctctttggattcttccaaaatcagagtcagactgctcccggtgccatgaacggagacgacgcctttgcaaggagacccacggttggtgctcaaataccagagaagatccaaaaggccttcgatgatattgccaaatacttctctaaggaagagtgggaaaagatgaaagcctcggagaaaatcttctatgtgtatatgaagagaaagtatgaggctatgactaaactaggtttcaaggccaccctcccacctttcatgtgtaataaacgggccgaagacttccaggggaatgatttggataatgaccctaaccgtgggaatcaggttgaacgtcctcagatgactttcggcaggctccagggaatctccccgaagatcatgcccaagaagccagcagaggaaggaaatgattcggaggaagtgccagaagcatctggcccacaaaatgatgggaaagagctgtgccccccgggaaaaccaactacctctgagaagattcacgagagatctggaaatagggaggcccaagaaaaggaagagagacgcggaacagctcatcggtggagcagtcagaacacacacaacattggtcgattcagtttgtcaacttctatgggtgcagttcatggtacccccaaaacaattacacacaacagggacccaaaaggggggaacatgcctggacccacagactgcgtgagagaaaacagctggtgatttatgaagagatcagcgaccctgaggaagatgacgagtaactcccctcagggatacgacacatgcccatgatgagaagcagaacgtggtgacctttcacgaacatgggcatggctgcggacccctcgtcatcaggtgcatagcaagtgaaagcaagtgttcacaacagtgaaaagttgagcgtcatttttcttagtgtgccaagagttcgatgttagcgtttacgttgtattttcttacactgtgtcattctgttagatactaacattttcattgatgagcaagacatacttaatgcatattttggtttgtgtatccatgcacctaccttagaaaacaagtattgtcggttacctctgcatggaacagcattaccctcctctctccccagatgtgactactgagggcagttctgagtgtttaatttcagattttttcctctgcatttacacacacacgcacacaaaccacaccacacacacacacacacacacacacacacacacacacacacccaccaagtaccagtataagcatctgccatctgcttttcccattgccatgcgtcctggtcaagctcccctcactctgtttcctggtcagcatgtactcccctcatccgattcccctgtagcagtcactgacagttaataaacctttgcaaacgttcaaaaaaaaaaaaaaaaaa

SEQ ID NO: 147 - DNA, 7605 bp, Homo sapiens
gggatgaggagggggaaaccgggggaaaagagggaaaagagccgggagagaggtgggcaaggacgagggcgagggcacggccgggtcctggctggccaaacgaggctcgcggaagcagcagccgccgcctgaccgcagatatggaagaaagtagcagtgttgccatgttggtgccagatattggggaacaggaagctatactgactgctgaaagtatcatcagtccttcattggaaattgatgaacaaagaaaaactaaaccagatccattaatccatgttatccagaagttaagcaagatagtggaaaatgaaaagtcacaaaaatgtcttttaattgggaagaaacgcccacgttcaagtgctgcaacacactctcttgaaacccaagaactttgtgagattccggctaaagtaatccagtcacctgctgctgatactagaagggctgagatgtcacaaacaaattttacccctgacactcttgcccagaatgaagggaaggctatgtcttatcagtgtagcctttgtaagtttctatcatcatccttttccgtgttaaaagatcatattaagcaacatggtcagcaaaatgaagtgatactgatgtgctcagagtgccatattacatctagaagccaggaggaacttgaagcccacgtggtgaatgaccatgacaatgatgccaatatccacacccaatccaaagcccaacagtgcgtaagcccctccagctctttgtgtcggaaaaccacagaaagaaatgaaaccattccagatatcccagtaagtgtggacaatctacagactcatactgtccaaactgcatctgtggcagaaatgggtaggaggaaatggtatgcatacgaacagtacggcatgtatcgatgcttgttttgtagttatacttgtggccagcagagaatgttgaaaacacacgcttggaaacatgctggggaggttgattgctcctatccaatctttgaaaatgaaaatgaacccctaggcctgctggattcttcagcagctgctgcgcctggtggggtcgatgcagtcgtcattgctattggagagagtgaactgagtatccacaatgggccatcagtgcaagtgcagatttgcagctcagaacagttatcatcttcatctcctttagaacagagtgcagaaagaggagtacacctaagtcagtcagttaccctggaccccaatgaggaagaaatgctagaagtgatttctgatgcagaggagaatctgattcctgatagcctgcttacatcagcacagaaaatcatcagcagcagccccaataaaaaagggcatgttaacgtgatagtggagcgattgccaagtgctgaagaaaccctttcacagaagcgcttcctcatgaacactgaaatggaagaagggaaggacctgagcctgacagaagctcagattgggcgcgaaggaatggatgatgtttatcgtgctgataaatgtactgttgatattgggggattgatcataggctggagcagttcagagaaaaaagacgagttaatgaataaaggcctggctactgatgagaatgccccaccaggccggagaaggacaaattctgagtctcttcgattacactcattagctgcagaagcccttgtcacaatgcctataagagctgcagagttgacaagagccaacctggggcactatggagatataaaccttttagatccagatactagtcaaaggcaagtagatagtacattggcagcgtactcaaaaatgatgtcgccacttaaaaactcttcagatggattaactagtcttaaccaaagcaactccaccttggtagcactcccagagggtaggcaggaattgtcagatgggcaggttaagacaggcatcagcatgtccttactcaccgtcattgaaaaattgagagaaaggacagaccaaaacgcttcagacgatgacattttgaaagagttgcaggacaacgcccagtgccaacccaacagcgatacaagtttgtccggaaacaatgtggtggaatacatcccgaatgctgaacgaccctaccgttgccgcctgtgtcactacacaagtggcaacaagggctacatcaagcagcacttacgagtccatcgacagagacagccttatcagtgtcctatctgcgagcacatagcggacaacagcaaagatttggagagtcacatgatccaccactgtaagacaagaatataccagtgcaagcagtgtgaagaatccttccattataagagtcaattgaggaaccatgagagagaacagcacagtcttccagataccttgtcaatagcaacttctaatgagccaagaatttccagtgatacagctgatggaaaatgtgtccaggaagggaataagtcttcagtccagaaacaatatagatgtgatgtgtgtgattatacaagtacaacatatgttggtgtcagaaaccacaggcgaatccataactctgataagccgtacagatgctctctgtgtgggtatgtgtgtagccatcctccttctttgaagtctcatatgtggaaacatgcaagtgaccaaaattacaactacgaacaagtaaacaaggctattaacgacgcgatttcacaaagtggcagagttctggggaaatcccctggaaagactcaattaaagagcagtgaagagagtgcagatcccgtcactggaagttcagaaaatgcagtgtcatcttcagaactgatgtcccagactcccagtgaagttctgggtaccaacgagaatgagaaactgagccctacaagtaatacctcatatagtttagaaaaaatctccagtctggcccctcctagcatggagtactgcgttttactcttctgctgttgtatttgtggttttgaatcaaccagcaaagaaaacctcttggatcatatgaaagagcacgagggtgaaattgtaaacatcatcctgaataaggaccacaatacagctctaaacacaaattaggtggaataatgactcgagcaggaaagcagtagaagaggattccttcaccacagtttcacctttacgctgtcagacaacttcctgccacagaagaagtcgttgatgtgatttttgaggaaatgacagatgtgactttggaaccaaacttgtaataaaaggaattccaaatggacaagcagtaatgatatttaaatattttgagtgagggggagtgggtcaaagaggaagtagaggtgtaatcctgtattaaccctctgtcaccccttcttagtgtcgagtgtatttattaataaaagcttattagagtgtagaaatgccagcaagagttaagaaagggcttttcaggaactattctaaaagtcataaaagggtcacagtcttaagcagagcttagttttcttctcacttgtcaaatgcagactgtgaggcctccagtgagaaatgggaggcagttctgggagggggttttttcagtgtcaccaacagagtcaacaaggaaacataattagagggctttgaaatgatctactgaaatacctaaattgatagaaattaatcatactcaatctaggacatgttcctttactccttaaaaaagaaaggaaagatctctaaattcaaagctagattgtaaataggcattcaagaagtattgtcttaaatttacgatgaatttcttgtgagcagaggacgaaacaggtgaattctcaccagactcaaaccagatctcaattcgtagtaatgctaaatcgtcttccgtgttctcagaggttcttttcagtgtctgtcagaacttggcatactttctccatagtacgtagaccttctaatactctgctaaatgaaaccacacttgttatctgaaagtgtgtgaaagaaacaatgtatgaaaatttacatttgatcatccggcattggaaatagtttgaactatttccaaaaatcccttaggggatgaggggtgaaatttaaaagctcctgaaaatgagtactgctgtgttgagcttttctttcctggggtatattaatttagttatatttagcagaagaggaatataaccaaatgtgactaaaatatagcagaaattcaggttgtttgtaaaaattttaataacaaatagcatttggcaagtctataggattcttcctatctggaaattctattttgttagagtgcgataggacatatggaaaaccaacacaaagtgctttagcattaaaactcaccatcaaatagatgtaatcttattaattacacattttgtattttaattatttcaaggagtgaagaaaacagggtgtttttgtttttgtagttctgattactcatttatgcattgttttgtttaagtaaattctgcctacaagtgaaaaggtcggtgcgctcttctgtgcaccatcctcacggtgctatttccgaatatctgaatattgatttctaacacctggatgaggctgtgaccgatcaacttggaacactgtaaaggttttcgaatgggatacgctgtaggcacgttttaagaagtattctgttcctaaagtccaggtatgattggattaatatttataaaattattattaggaattatttaagtggggccaggcatcttgcaacattttctgattttttttttctttctttctaatctcattttggtgatatttaaacaaacataaatgattgtaactttgcagcttttttatttaggtagctttaatttatttatgaaagttaatccatttctgatacgtggtttttaaaaatatgaaatggatttatatatactatattcctcaaatccactgtatgtggacttatattcattttctccttttttcggaattgaaacattttaatttcaaattcaaatagaacatttaaaatgatttcattattattacccatactgttgccactcatattgtaagtcagttttttcattgctggtacaatgactcagtatttctttataaaaatctgttgttctgaaaatcaacaaccttagaaggattttgtcttagaaaatttccttggctttagttttatatcatatttagaaaataataatgaaaagcatccccaaaatttcaatgatgtgaatttttaaattacctttatttctttaaactaattccattgattgttacttaaattttccacctggaatcatggatttaaaatttccccacctcatggggaaaaaactaacccagaagttcaaagcctttaaagtttcatctgattctggccttagaattgtccttaaaagctttctcctggccgataggaggaagcatatatcaaggaggttctttcccttcccattatcattttgtggcaagccttaagttaacaatgtgtctaccaagaacaattgagttttctaaaagtaataatgaagattatgcaattctaactgtagaagagatagctattaaaataatcagtagcctgggcatagtggctcacacctgtaatcccaatactttagaaggccaaggctggaggactgcttgagtccagaagtttaagaccagcctgggcaacacggggagaccctgtctctacaagaaattaaaaattagccaggcatagttggcacgtgcctgtagcaccagctacttgggaggttaaggtgggaggatcacttgagcctgggagatagaggcttgcagtgagccgtgatggcaccattgcactccaaccggggtgacagatgaggtcctctgtttacctccccccccaaaaaaaaaattcagtaggaattccttcatagaataacatgttatttattggtattgacttcttattagacagagctcatagtatttgttttctgctccgaacacttaaaaaatactaagacgtgatagtgaaaatagttttgaaaagaaactacatatggcaaaggtggggaggggggaagatgatgcattctgatcattataaagaatacttttcagggctctatcattttctccctttctctaatcatccagaatatggcgggtgtcccagtgttcaacagtatcatgctaatattccatttgatcggtagtccaagttctttggccagatggtgcaatgttgtgacaccgaccgaagcctttgttctggatctttcttcctattgaaggtggctgctggtggcttcataattttctgttttttttctcacaaagtaaatggtgggcatccatgtttacattgcaccttcccgtgctgtaattggcttgacaaagacaagcaggcttctctgttgagacttattgtgtttttagttttcatagacacttatttaatctttttaaattgtacagcaaggtgctctaagtaatattcgataaaatatatttaatagaaatttgcgtttgatattcatgaacatgaatacatgtatttttttaagaaataagtattgtgtaacactatggcattgcttctatagccaaagtataaaaatttctggaatactgacatgtaaagactacagttaattctgacactgtatcttattaaaataggatgatttgcattttgtaaaattatcctgcacatcaagctgcatgccttaaagcggaaactctaggactgtgttcatgggagagcagttcatctgttcagaacagtgaggcaaggtctgtagtgcttctttaactacctttggaaatactgtacaatgttagaataatttattttgctttacaggagtttgtcatgtattgactttaatattgtattttggtaataaattttttgttaaaaaaaacttggcttcaagttctattaaccacaggttgtgttcattcttttcctggaaatgatgactttattgcttagaaagttgtaaataattaaaagcttcccaagagttaaatgaaggttatgatgactcttgataacttgttaatctgttgctgactagcattagactgttacacgaagataaactgaataagcatttagctttttaaatcattttaaaaattaagtctaattttgaagcttttttccttgctacccagttcagtttctcttccaaatgtgacacgcttatatgctttcaattctgatatagtcaaagtgctaaagactagttctgctattgacgaaggaattagcattccttagtgaaggccaaaaactacagtgatatgttcacaccttgatcactctgtcgtctatacagacagctattgacatatttgttgcattgacgaagctaacatcatctgactgtatcgtgggtctggttatccatttgtgccctagaatcctgggtcacctcagttgaaagtgaccaaggccaaatatttcgtcccatgcttcccagggacaacataatcatatcccctgtctttgaaaaacccaatctgaaactgtgtcactaacctccaaattaaagaatccgagcatggaagctctagaacgtatggtccagtgtggcagccactataatatctaagtgtaaaatacatagcagttgcaaagacttagtacaaaaagaatggaaatgtattaacagttttttatattgattacatgttgaaatgatattttggtttaaataaaatattaaaatcaaaaaaaaaaaaaaaaaca

SEQ ID NO: 148 - DNA, 4782 bp, Homo sapiens
aagtttttaatgatacctgccgctcaggtggcctaggtggtagtcatgccttgcttctacttacgtagttgtggttctctcttgcctgaactaaagcttgaagagagaacagaatttgctcataggatatgggacacacttcagaaattaggtgctgtgtatgatgtgagtcactataatgctttacttaaagtctatcttcaaaatgaatataaattctcaccaactgatttcctggcaaaaatggaggaagcaaacattcaaccaaatcgagtgacataccagagattgattgcttcttattgtaatgtaggagatattgaaggtgccagcaagattcttggatttatgaaaactaaggatctcccagttacagaggcagtattcagtgcccttgtgacagggcatgccagagctggtgatatggagaatgcagaaaacattctcacagtgatgagagatgccggaattgagcctggtccagacacatacctcgcattattgaatgcatatgctgagaagggcgacattgaccatgttaagcagactctggagaaggtggagaagttcgagcttcaccttatggaccgtgatttactgcaaattatttttagcttcagtaaagctgggtatctcagtatgtctcagaaattttggaaaaagtttacatgtgaaagaagatatattccagatgcaatgaacctcattttacttttagtcactgaaaaattggaagatgtagcgttgcaaattttactagcatgccccgtatcaaaggaagatggcccaagtgtctttggcagtttctttttacaacactgtgtgactatgaatacgcctgtggagaagctaacagactactgtaagaagttaaaggaagtccagatgcactcctttcctctgcagttcaccctccattgtgctttactcgccaataaaactgatttggcaaaagccttaatgaaggctgtgaaggaggaaggttttcctatcagacctcactatttctggccattgctagttggacgtcggaaggaaaaaaatgttcaaggtataattgaaatcctcaaaggaatgcaagaattgggagtacatcctgatcaggaaacatatacagattatgtgattccatgctttgatagtgtaaactcagcacgagccattttgcaggaaaatggatgtctgtctgatagtgatatgttttctcaagctggattgagaagtgaagcagcaaatgggaacttagactttgtattatcatttttgaaatcaaatacattgcccatctcgctgcagtctataagaagtagcctactgctaggcttcaggaggtctatgaatataaatgtttggagcgagataacagaattattgtacaaggatggacgttattgccaggagcctcgaggaccgacggaagctgttggcaattttctttataacttgattgacagcatgagtgactcagaggtacaggccaaggaggagcatttgagacaatacttccatcagctggagaagatgaatgtaaaaattcctgaaaatatctacagaggcattcgtaatctcctggaaagctaccatgttcctgaattgattaaggatgctcacttgttggttgagcgtaagaatttagactttcaaaaaactgtgcaacttacatcatctgaattggagtcaacacttgaaacactaaaagctgaaaatcaacctataagagatgtcctaaagcaactcatattagtgctttgttcagaagagaatatgcaaaaagcccttgaattgaaagcaaaatatgaatccgacatggttactggtggctatgcagctttaataaatttatgctgtcgacatgataaagtagaagatgccttgaacttgaaagaagaatttgaccgcttagattcatctgctgtccttgacaccggcaactatctaggccttgtaagagtattggcaaagcatggcaagctccaagatgctattaagattctgaaggagatgaaagagaaggatgttcttatcaaagatacaacagccttgtcctttttccacatgctaaatggcgcagctttaagaggtgaaattgaaacagtaaaacagttgcatgaagccatcgtgactctagggttagcagaaccatccaccaacataagtttcccattggtcactgtacacttggaaaagggcgacctatctactgctcttgaggtcgccattgactgctatgaaaagtataaagtattaccaaggattcatgatgtcttgtgtaaactggtagagaaaggcgagactgatctaattcagaaagcaatggactttgtgagccaagaacaaggtgaaatggtgatgctctatgatctcttctttgccttcctacaaacaggaaattacaaagaggccaagaagatcattgagactccagggattagagctcgatctgcaaggcttcagtggttttgtgacagatgtgttgcaaataatcaggttgaaactctggaaaaattagtggagctgacacagaagctatttgaatgtgatagagaccagatgtactacaatctgctaaaactgtataaaataaacggtgactggcaaagagctgatgcagtctggaataaaatccaagaagaaaatgttattcctcgtgaaaagacattaagattattagcagaaatccttagagagggtaaccaggaagttccgtttgacgtacctgagttgtggtatgaagatgaaaaacattccctgaattcttcgtcagcctcaaccacagaacctgatttccagaaagatatattgattgcctgccgattgaaccaaaaaaaaggggcatatgatattttcctgaatgcaaaagagcaaaacattgtgtttaatgctgaaacctacagcaatctcattaaattactgatgtcagaagattattttacacaagcaatggaagtgaaagcattcgcggagacccacatcaagggcttcacactgaacgatgctgccaacagccgcctcatcataacgcaagttaggcgggattatttgaaagaggctgtgacaacactgaaaacagtattggatcagcagcagaccccttctaggttagcagtgacccgtgtcatccaggcattggccatgaagggtgatgttgaaaacatagaagtagttcagaagatgttaaatggactcgaagactccattggactttcaaaaatggttttcatcaataacattgctttggctcaaataaagaataataacatagatgccgcaatagaaaacattgaaaatatgcttacttcagagaataaagtcattgaaccccaatacttcggcttggcatacttattcagaaaagtaatagaggagcagttggaaccagcagttgaaaagataagcatcatggcggagagattggccaatcagtttgcaatttataaacctgtcactgattttttccttcaacttgtggatgcaggcaaggtggatgatgccagagctctcctacagagatgtggtgcaattgctgaacaaaccccgattttgttgttgttcctccttaggaattctaggaaacaaggaaaggcatcaactgtgaaatctgtgttagaattgattcctgaattaaatgaaaaggaagaagcatacaattccctcatgaaaagctatgtctcagagaaagatgtcacatctgctaaagcactgtatgaacatttgactgcaaagaatacaaaattggatgatctgtttctaaagcgttacgcatctttgctgaagtatgctggagagcctgtccctttcattgaaccccctgaaagctttgaattttatgcacagcagctaagaaaattgagggaaaactcttcttgaaataaccaggcgatactttgttttgtatatatttgtgattctgtgtctacatgttattttgaagtatatctgagggaaaaataaatgaaaattttctttatgtacttatgtatgtgtgatgcatgttcaaagtcttattgaccataactctgtgcacttggttattggacatttttggagttttttctctgggaaaaatcgatagtgttttcttcaatgctgctgctgtgtgaagccatacttttcaggattcttccctaattggctctttggtttccctgctctgtttcatttatttcattaaaatgttattcctttatttaagattcacttattagtctgctgtttctctgaaaaattttagagctaggtatagtgaccgtgaacttctaacgcataatatctgtgatacagccattccgtacatgtgtgagtctgcataactttcgaactttcgaactttgttaaatgttggcactaggagtcatcagatctaggattcatcattttccagtgagaagcagagacccaaaggcctgttacttgtgcttggtcaggggactgtctgtcatgcctggaggctcttcggcacacttccccatctttcccttctgccactgtggcttcaagcacctctgttcatagagcgtctctgaaattgagtctcggtcatgacttatcccgaagtagagcaatgtgtttcctctcattgtagtttcaggactttgtcagtacaagctctgccctaggcttcttactttatactcatatcctgaaaagatgtgatttcatctatgaaggggtaaaatattggtttgtatttaattgtttgaaataaaagtgatccctataaaaaaaaaaaaaaaaaaaaaaaaaaaaaaaaaaaaaaaaaaaaaaaaaaaaaaaaaaaaaaaa

SEQ ID NO: 149 - DNA, 2630 bp, Homo sapiens
tgaaatcagactttggagccacaaagaaccattccaattctgggtcgtccgcttacacacggtgaacggagcacatttcttctctgagccttggttcctttcctgtaaatggagtataaccactcccatcttgcaggagctttttggtgataattaaggtgacttcgtgaaaagtaccagggtctcaaaaatctcaaattttgtggaaagtatgcagtttctaggttggagaggctagagtttggtttcaaaagcctcgaccacacacaggggcggttacagctcttgaggtcccgggggtcacaggacgccttccgagttggggggaggagaaaacaaaaccacaggaagaaacgaacaacgctttcgggtgggcccgggaccatagagggtcgctccgccactttcctagagcgaccgcggcggcgccagagcgcggcgaggccctcacttccggcggcgcgggaggcgcccagcgagccagagtggtggctggtcccgcgcgaaaattctgagctgtacacctctaggaaatgaaacactagttcagaagaagcctgtaaactctcttacaaatacatttggttattcaccatgaggttagcaaagcctaaagcgggtatttctcggagctcaagccaaggaaaggcctatgagaacaagcgcaaaacaggccggcagcggcagaagtggggcatgactattcgatttgactcaagcttcagtagactcagaagaagcttggatgacaaaccctataaatgtactgaatgtgaaaagagtttcagtcagagttcaactctttttcaacaccagaagatccatactggaaagaaatcccataaatgtgctgattgtgggaaaagtttctttcagagttctaatctcattcagcatcgacggatccatacgggggaaaagccctacaaatgtgatgagtgtggagaaagcttcaaacagagctcaaatctcattcagcaccagagaattcatactggagaaaaaccctatcagtgtgatgagtgtggccggtgtttcagccagagctcccaccttattcaacatcagagaacccacactggggagaaaccctaccagtgcagtgaatgtggcaaatgtttcagtcagagctctcatctgaggcagcacatgaaggtgcataaagaagagaagcctcgtaaaacccggggcaaaaatatcagggtgaagactcacttaccctcttggaaagctggtacaggaaggaagtctgtggctggtctccgttaagtatagggctttttgacagctttttgagacctcttaagaaaaaataaaaagtaaaaaatgaaaggaatcttttttagaaatagagatgctttatagtagatcacttaaatactggatcttttgctagtgtgaaaacattgggaatttaatgacattattgagctgaaagaaattacatgagtccagctaccctcatttcttttttatgtgacatggagcacaaagaactgaaaatatgttttgagggagcatgacatccttgacctcatttgaaattacttccattttcaaaaaccatcatgttttgcagatacattttgagaaaaaccatcatgttttgaggatacatttgtgaaagtgcaggcatgccaatgactactcagttttaggacttttgtggaagaaaaattaaaagggagaagaaatcaattccactacttttgaagttctgcaacagatgagattttgtttgtaaagttttgtagtatattaaccattggtttatcactctagattcaacatattaaaatgtattcaagctcacagatttttaatcagtaaggcctatctatattagttgtcttttatttcttctccttgtggacagttgttaatgaaaggagtaaggatttccctttttttgttttgtttgttttgttttttttaaccaaattcttagagatactatagaatccaaatgagaactgaattggacctcaagtcttctattcctactaatagagttctttgtgatggtaactgctgtgtcgtttgttttccacaagttgggatggattcatgtcgatacatccccatgcccttgacctcttctggcattctcctgtgctctgacaaactgagccagccttttagatctacatgaataaacaaactattttaccaagaaaaatctcagcttgcttactgcttaattaaaaacctacaatttacacacctccctgccttcaagactgtgagctttggatagccctgcttaaatgtttgtcaacaacaagagtcgtaatgtgtcagtacattgtagctcctttgaaatttaactctttctgtgttacatgaattgttttaaggagtccggcaaacatgtttcttcacttccatgagaatggtgccaagtgtcagactctaatgagccctcagctcaggttttaatttctattgaatgctaacattcttctgattttttggtatcttttataatcatatcggtttctgctgtattaatgacaattattcatgaaaataaaaaatgaaatattttgtatactaaaaaaaaaaaaaaaaaaaaaaaaaaaaaaaaaaaaaaaaaaaaaaaaaaaaaaaaaaaaaaaaaaaaaaaaaaa

SEQ ID NO: 150 - DNA, 2584 bp, Homo sapiens
gggggcgtggccccgagaaggcggagacaagatggccgcccatagcgcttggaggacctaagaggcggtggccggggccacgccccgggcaggagggccgctctgtgcgcgcccgctctatgatgcttgcgcgcgtcccccgcgcgccgcgctgcgggcggggcgggtctccgggattccaagggctcggttacggaagaagcgcagcgccggctggggagggggctggatgcgcgcgcacccggggggaggccgctgctgcccggagcaggaggagggggagagtgcggcgggcggcagcggcgctggcggcgactccgccatagagcaggggggccagggcagcgcgctcgccccgtccccggtgagcggcgtgcgcagggaaggcgctcggggcggcggccgtggccgggggcggtggaagcaggcgggccggggcggcggcgtctgtggccgtggccggggccggggccgtggccggggacggggacggggccggggccggggccgcggccgtcccccgagtggcggcagcggccttggcggcgacggcggcggctgcggcggcggcggcagcggtggcggcggcgccccccggcgggagccggtccctttcccgtcggggagcgcggggccggggcccaggggaccccgggccacggagagcgggaagaggatggattgcccggccctcccccccggatggaagaaggaggaagtgatccgaaaatctgggctaagtgctggcaagagcgatgtctactacttcagtccaagtggtaagaagttcagaagcaagcctcagttggcaaggtacctgggaaatactgttgatctcagcagttttgacttcagaactggaaagatgatgcctagtaaattacagaagaacaaacagagactgcgaaacgatcctctcaatcaaaataagggtaaaccagacttgaatacaacattgccaattagacaaacagcatcaattttcaaacaaccggtaaccaaagtcacaaatcatcctagtaataaagtgaaatcagacccacaacgaatgaatgaacagccacgtcagcttttctgggagaagaggctacaaggacttagtgcatcagatgtaacagaacaaattataaaaaccatggaactacccaaaggtcttcaaggagttggtccaggtagcaatgatgagacccttttatctgctgttgccagtgctttgcacacaagctctgcgccaatcacagggcaagtctccgctgctgtggaaaagaaccctgctgtttggcttaacacatctcaacccctctgcaaagcttttattgtcacagatgaagacatcaggaaacaggaagagcgagtacagcaagtacgcaagaaattggaagaagcactgatggcagacatcttgtcgcgagctgctgatacagaagagatggatattgaaatggacagtggagatgaagcctaagaatatgatcaggtaactttcgaccgactttccccaagagaaaattcctagaaattgaacaaaaatgtttccactggcttttgcctgtaagaaaaaaaatgtacccgagcacatagagctttttaatagcactaaccaatgcctttttagatgtatttttgatgtatatatctattattcaaaaaatcatgtttattttgagtcctaggacttaaaattagtcttttgtaatatcaagcaggaccctaagatgaagctgagcttttgatgccaggtgcaatctactggaaatgtagcacttacgtaaaacatttgtttcccccacagttttaataagaacagatcaggaattctaaataaatttcccagttaaagattattgtgacttcactgtatataaacatatttttatactttattgaaaggggacacctgtacattcttccatcatcactgtaaagacaaataaatgattatattcacagactgattggaattctttctgttgaaaagcacacacaataaagaacccctcgttagccttcctctgatttacattcaactctgatccctgggccttaggtttgacatggaggtggaggaagatagcgcatatatttgcagtatgaactattgcctctggacgttgtgagaattgtgctttcaccagaatttctaagaatttctgctaaatatcacctagcatgtgtaattttttttccttgcctgtgacttggacttttgatagttctataagaataaggctttttcttcccttgggcatgagtcagatacacaaggacccttcaggtgttactagaaggcgtccatgtttattgttttttaaagaatgtttggcactctctaacgtccactagcttactgagttatcaggtgcaggtcagactcttggctacagtgagaggcagcttctaggcagagttgcttaatgaaagggtttgtaatactttacaaaccattacctgtacctggcctggcctccaaaatattaacattctttttctgttgaaactcgcgagtgtaactttcataccacttgaatttattgatatttaattatgaaaactagcattacattattaaacgatttctaaaatc

SEQ ID NO: 151 - DNA, 852 bp, Homo sapiens
ggcagcacaagccatgtggaatctccaccaggtgtacagaacggtgcctctgcgtcctgccactcaggacctctcaagtccccgatgtgatggctcctcagcatgatcaggagtgagcgtaattcagacctatttagatccgtcagcccacggaccagggggaccttgagcaggacagtctttgtctccaagcagtcattccctgttatacaagcaagagtcaggaggaggaatggttttggctatcatcccccacaagacagcaatggggcctttaggcctggaaggaaggaccaggctgcggctggcatatggaggttgagcccgtgggcacggggcatcagcttcacccggctgaggatgccttctgctgggttggtccatctggcaccagctggcttcccagcaccgccccagaacaatcagactcctccttctgctgtggccatggcaaattggctgccatattgtacctcagagcactagctcctatctggattttcccgcggggttcctagagggtgggagatgggtctccaggatttttccctttcccctgatatctatccaataagaattcataataacatatgatttttctaatagcctaagtggaggattactatgtgtcaggctctggtgccagacactctctacctgttattcaatgtggctgagaacagacttatgggcatgaaattcagaacgttccccattcagtttcctggtactaagaagacatttcttttccaacagggaatccatgaactgctaaccgggttgggagcctcccagggtaaccagatttttgggtacccaacttggctggggggaggcacggggaggagatcc

SEQ ID NO: 152 - DNA, 294 bp, Homo sapiens
ctgttgtgtctgtggccatgggacagacaatcaagatcacatgccaaggagacagcctcaaaaagttttatgcaacctggtaccagcagaagccagggcaggcccctgttcttgtcgtctatggtaaaaacaaccggccctcaggaatcccagaccgattctctggctccagctcagggaacacagcttccttgaccatcactggggctcaggcggaagatgaggctgactattactgtaattctcgggacagcagtggtaaccatgtattattcggcggagggaccagcctga

SEQ ID NO: 153 - DNA, 1853 bp, Homo sapiens
acaggacccacagatatctgctgccatccacactctccagattggtgtcctgggaccacgtggggatgctgccgtggcttcttgtcttctctgctctgggtatccaggcctggggtgattcctcctggaacaaaacacaagctaaacaggtatcagaggggctccagtacctatttgagaacatctcccagctcactgaaaaaggccttcccacagatgtctccaccacggtctctcgcaaggcatggggggcagaagctgttggctgcagtattcagctgaccacgccagtgaatgtccttgttatacaccatgtccctggactggagtgtcacgaccagacagtctgcagccagagactgcgggaactgcaggcccatcatgtccacaacaacagtgggtgtgatgtggcctacaacttcctggttggggatgatggcagggtgtatgaaggtgttggctggaatatccaaggagtgcacacccaaggctacaacaacatctccctgggctttgccttcttcggcactaagaaaggccacagtcccagccctgctgccctgtcggccatggaaaacctaatcacctatgctgtccagaagggccacctgtcatccagttatgttcagccacttcttgggaaaggcgagaactgcctggcccctcggcagaagacaagcctgaagaaggcttgccccggcgttgtcccacggtctgtgtggggagccagggagacccactgtcccaggatgactctcccagcgaagtatggcatcattatccacactgccgggaggacctgcaacatttctgatgagtgccgcctgctggtccgggacatccagtctttctacatagacaggctcaagtcatgcgacattggttataacttcctggtgggccaggatggcgccatttatgaaggggtgggctggaatgtccaaggctcctccacccctggctacgatgacattgccctgggcattaccttcatgggcaccttcacaggtataccacccaatgctgcagcactagaggcagcccaagacctgatccagtgtgccatggtcaaagggtacctgactcccaactacctgctggtgggccacagtgatgtggcccgaaccttgtctcctgggcaggctttgtacaacatcatcagcacctggcctcatttcaaacactgagagaagccccaggtccttctgagactgctttccctcccctgtcaggtctctcctgtcctaaccatccagcttggctcaacaccttttgccctcctcccctgccacacagtcctgtgcctcctttttcaggttgggatgatcatgccctctcctgccaacatcctccaagggcctccaaacctcatagctggacattcacagccctctgagtctgagtccagatttcttctctccttaccttcctctcccttggaaacccaactcctcagccaggtgagacaatgggctggttcttgtttcatttctctctctctctccattcccctctgcctggtgagccttcccctggtgtctgcctggcagcccccacctcccacctatcacccctcacccataactcaggtcaacgtgaccaaccttccttgcttacacataaacttgtatatatttggatgtagcccttatttaatggctgtcattatttatagatatgtctatccttgctacttggttgtgagtttctccaggggaggaactgtgttttattcatctctatgtcctctgtttctcagcagtgtctgaaatttaatgggttctactgatgtttattagagaaatggatgaataaatgaatgaagagatccaaaaaaaaaaaaaaaaaaaaaa

SEQ ID NO: 154 - DNA, 451 bp, Homo sapiens
gaaacacctgtggttcttcctcctgctggtggcggctcccagagggtcctgtcccagctgcagttgcaggagtcgggcccaggactggtgaaggcttcggagactctgtccctaagttgcactgtttccggtggctccatcggcagaggcagttactactgggcctgggtccgccagtccccagggaaggggctggagtggattgggagtgtctattatactgggagcaccaactacagcccgtccctcagcagtcgaggcaccatttcagtggacacggccaaggaccagttctccctgaatttcaactctgtgaccgccgcggacacggccgtttattactgtgcgagggccgtcggtggtaaaaacccaatctttgagtactggggccagggaatcctggtcaccgtctcctcagcatccccgaccagccccaaggtcttcccgctga

SEQ ID NO: 155 - DNA, 537 bp, Homo sapiens
  misc_feature (533)..(533): n is a, c, g, or t
cttttataaacaccacacatcttctaatgctttcatgttaaaagcgggagtggatcccacattcacctaaaggcccaggtagggactttttttgcagaaaaccaatttcttgtaacaagtactggaacctcattgtagccttgagtcctcactcctccttttgttctaagtctgggtctgagaagtgcaggcctcacacagctgtcagttccaagtgaccagggctgtaacaggtcctggctgaccctgggaatgtcaggggattctgggaagtaagaaggaggggcatttgcccatagccccggggcagacaatgtgtcccgagggccaggccaggctgtctactccatctccctggggcgagtgcacctcgggtcacctggcagcatcctttccagcccttctggagacagtcagcagctgattcattccgggaaccagcatggcaggtgccggggctggtcagggcccagggctgtacccctcagcactgcccccttgggactgttgggctccgaggagcctggcgctgnggtc

SEQ ID NO: 156 - DNA, 1976 bp, Homo sapiens
caccgccagccaaagcagtcccttccatttcaggcaccggcctgggcccgggagacaccgcaaggctatttaagatggtgtggtttgcccatctacgttgatcgtcccaagaaaggggcaccgtctgcagaacttgccaggaaagtcatcctgggcggcgcgggccacgccagggtctccccgcgcggcttcctcccccggcgccttctctcgggcgcgcgtgcgccccctgcaggcggcccccgggagagcctcgcgggggagccgggagcctggtttccccgccaacccccatcccgcccgccccggcggccaccctgggggcgaggcagcccggcgcgtgggaggggacggcgcgccattggcttgtgcgcggaaccgagaggagggaccagcgcgggccgccagactcgcccttctgcagaggccgggctggaggagaagatggcggccaagcagcccccgcctctgatgaagaagcacagccagacggacctcgtgagccgcctgaagacccgcaagatcctcggcgtgggcggggaggatgacgacggggaggtgcatcgctccaagatcagccaggtcttaggcaatgaaatcaagtttaccattcgggagcctttggggctcagggtctggcagttcgtctctgctgtgctcttctccggcattgccatcatggcgcttgccttccctgaccagctctatgatgcggtctttgatggagcccaggtgaccagcaagacccccatccgcctctacggcggtgccctcctcaaggtggaaactgagtcagacagaggcgaggtgacttgtctgaggtcacagctagtgagtggtgaagccaagattggaacccaaggcaatccagcttggaaggacaaaggatggggtctctgaaacatctccagcctcagccctgctcctggccttctctctcatccagacatggctgcagcctctgggctgggactggcctccctacctccccttcaatccagtgcttccctgctgccagaaggagctttccagaaagcacatgtcaccacagccctctcttgctggaacccaacctctacaggagaccaagctgcctcctacagaccacaggacctccaagactcaccatcgccacctcttgttattcctgccctgactttcctatcaccaccatcaaaggagagtcccccagagattacatctcatggcccgggcttgcggagtgctgggctcccagacaaatgcaatcaaaggagacatgtctcctgggaagagcctcccacaacctcaaagccccgaaagccctccgtgtttatgttcttgcttgatccccacaaccgtccagcaaagccagcacagcagagatgattctatttccccaggagtggtgcccagagaagttaagcagtttgcctgagatgacacagccgtgttggagccgtgcttgcttgggatgaactaagtggcgcgcatttgattttactgctgatttcacagctccttcagctaccccaagctgccatcaatgtcccatcaatttcactttgtctgctcctctctgcaatgagctttctcagctctcagcctgtgttcagtaaagagacgttgctggtcttgtgtcacgtctcctcctgcctgaataatgctcgtgtgcagcatgaaggagaggtctctcagaactcaagggcctgaagctcccagaagcttccagatccagaggcaacaggtgtcttccggtcccagggagggcaagtttcctgaacctcgaaggcaggcagacagtggaggcctcccttccttctcacagcatcctccagctccaaggcaggcttcccccaacccccagggcccaggaactgtcatcagagcagaaatcaagcccagtcccaggcctcaccccacagggcatctgccccattgatatttgcttggtaataaatactggagactgagggaaaaaaaaaaaaaaaaaaaaa

SEQ ID NO: 157 - DNA, 840 bp, Homo sapiens
agcggagtgctgtgccttgtggtgactactggcggcagcgcgccgcgggcccgagacttagtctcgggccgccatggccagcgtccacgagagcctctacttcaatcccatgatgaccaatggggttgtgcacgccaatgtgttcggcatcaaggactgggtgacgccgtacaagatcgcggtgctggtgctgctgaacgagatgagccgcacaggcgagggcgccgtcagcctcatggagcggcggaggctcaaccagctgctcctgcccctgctgcagggcccagatattacactgtcaaaactttacaagttaattgaagagtcttgtccacagctggcaaattcagtgcagatcagaatcaaactgatggctgaaggcgagttgaaggatatggaacagttttttgatgacctttcagattctttctctggaactgaaccagaggttcacaaaacaagtgtagtaggttgtttctgcgtcacatgatcttggcctacagtaagctttctttcagccaagtgtttaaactgtacactgcccttcagcagtacttccagaatggtgagaaaaagacagtggaggatgctgatatggaactgaccagtagagatgaggtgaaagaaaacattggaacaagaagcacttgatgtatctgtaagagaagaggaggtattcttgcagtggggctctgtcccaaaaacaaggcgaattttttctttctcaacgggttcttggtaagaatgtgagataagggctcactccggttctgggaggattcacacttgtgaatttattggttgggaagcttatcgagattaaaaccgggtcacatgttg

SEQ ID NO: 158 - DNA, 485 bp, Homo sapiens
  misc_feature (464)..(464): n is a, c, g, or t
ttttccggaacctttaattttattatgtggaatgcttaatgcagagttaataggggctagagtggctaggagaggggactactgagatatataacaggagacagtaatgagttacatgtggatttggggggctgcagaacaggaaaataggggcagatatagctacatactttattcaaataccactgggaggcaaggggtaagaggcaagggcagaatgtacaggtcaggattctagtgtcttcagcctgccgacagcaacctgggtgctgggccctgtgtctcctggagccaagggttagggcctgagcagctgtcactctctgggaagcccagggagtggggctgactgagcaggggccatagagcctagtaagggaagagggagctggcaaggagcatctggtcatgcttttcctgtccccaaggcttctgtagagggactgtgtcctgactcggctcanatctgtggcaacggagtctcc

SEQ ID NO: 159 - DNA, 476 bp, Homo sapiens
ttttagtgatggggatttattaaagcattcacagggaaataaggaagacaagaacagctacacaggcagcctcatggaagaacagaaacttgaaaatggttcatgatccaaagcagctctagagcctggcttatcttgtcaccccctcagctgcaggcatctgttgctcccttctctagtgcttcccaaattggtgactcaactcctttctggctgtatttatactcctcctactgctactgactaacttctttctgcccccctcgatgctagcccatggctttttctgcctcatgggtcctgcagcttcatggctcccggcgcttcagttcctattaatccatggcttttctgcattgtagctcctgctgcctcttccattcctgttgccatgttgccacatggttctggctaccttgggttcttgagtctcatcgcttctactgtctcatgatcttatctattcaagccttctg

SEQ ID NO: 160 - DNA, 2827 bp, Homo sapiens
cggaagtcacgggaaggactcagcaacaaggtatctgtgaaggtgtgttcgggggtcttcaggagtccgtgtcatcccagcatgagagaaaggatcagggagggcagagactctgcagacctgaagctgggcttgcttatgacctccctcccacccaccagccccgtgccctgcgtgtcctgtagggtcttgttaggggcactatgctggccagcacagggatgggtgcgtcctacaaggaaccaggtagacccctgcacacttccgcaggtgcacatgtggcttctaaagaatatggttaggtttgcaaatgaagcacagagactaggttctcagaagcagcgaaggtgcagagaagctatggctcaggcttccttcagtgttcctgccttaaagccaaggggaagtggctagatgtgggggtgcatatgggctctctggctgtgacagatccccttggggacaacttcagtcagctttagtcctataatcggattgcctgacacctgcggtgggggttgcctggagaaaaagaaggtatctcctgaaagggactctgagcgccaggggccagggcgttggcggctctgcattaggaacgcatctgaggaccagctggactcagcctgtagcatgagaaaaacacacatctaagcagtgtttttgtgtttgtgggtaggaagaaaaagacccacccaaattagtgtgacatgaaacttttgagtgcagtgaaaatgtggtctgttttgattgatgcccaggcaagtcagtttctgcaaatctttcaacaataattgtagccctggaatgaaaggaatacaccttaaagtagctcatttcagttaatgcttgtttgctgtttccatttcagcttctcaatcccaactacatttatgacggtgagttctgttctttttcttctagtcctagagatgattctagacctgtggggcatgtttcagagcacttgagtgtggcctctggaaatgagttttccgtggcgctctaggcgtgcatagcaggttaggtcctatcaatctgtcggggacatgtgggtgggtgtggaggaggagccagggctgatgggcctttaccgactcctttcccatgcagttcccccagaattcgtcattccattgagtgaggtcacgtgtgagacaggggagaccgttgttcttagatgtcgagtctgtggccgccccaaagcctcaattacctggaagggccctgaacacaacaccttgaacaacgatggtcactacagcatctcctacagtgacctgggaaaggccacgctgaagattgtgggcgtgaccacggaagatgacggcatctacacgtgcatcgctgtcaatgacatgggttcagcctcatcatcggccagcctgagggtcctaggtaagcaccgtgcaacgaggattctacgtgacccagtggggcacgtctttcaggagtctccttaagtcctgagtctgcccttacactccaagtggcctgaaagatagaacaataagtcatttgtggggcttcaaaagacagttgtaagtagcagaccagagtgtctgggatgtcacaggagagtgacctctcggcaccttatgtaaagtcgggggagacaccggagctcctgttgctgggaggaggatgggggcctgcctggtgaaggcctctggctgcccaccatggggcaccagggccccccacgaccagcttctgagttggagcagggtgctttccgtgctcctagtactcaaaacactcatatccagctacccagctgaatctggatctggtctaggttggtctcatgtagaatgtgcatgggaaaagcaggaaaggagatgtgggtgagtcccgggcctgcgcaggccctgtgcctgtctgagaccctaacagcaacccttctgggtgaatgcacgccctcctcaccccatccaggaggagccaggcccagggcggctcagtagcttgtccagagcatctggctaggaggcatctgccatggggcctgcttgctccagtgtgaagagcttgttctttctcatcagctaaaccacaagctccctggggcagaaccaatatcttaggctctttcaaaacgtcctgtagttgcctgatgtagatagctgctgagaaaggtgtggactgttctctgctgccatcttgcagaaggccggccatgcagtactgggctgcaccacaaatggaggtgcctccagaggacaaataaaactccaaatgaaagataaattgagtcctggagcaccccgtctgtagacaataagcagaatttgtcttagaacttttgtcccagatatcttaatttcctgtttttaacaacattaaatcagaagacatgttctgattttttggatcatggaacaagaaatctaaaactctagaatttggcagtaaacaataaaaggtaaagattttctaatttgtaaataacacagaaattacacaggtgattttttttttttaatcactggcaaaagctaaaggactttagaaaggtatactattcagctgggcgtagtggctcacacctgtaatcccagcgctttgggaggccgaggtgggtggatcaccaggtcaggagatcgagaccatcgtggctaacacagtgaaaccctgtctctgctaaaaataacaaaaaattagccggcgtggtggcaagcgcctgtagtcccagctactcttgaggctgaggcaggagaatcacttgaacccaggaggcagaggttgcagtgagccgagatcatgccactgcactccagcctgggtgacagagcgagactctgtctaaaaaaaaaaaaaaaaaaaa

SEQ ID NO: 161 - DNA, 3405 bp, Homo sapiens
gtgcaatttgtagaggctgcagcacacgagagtgaacagcagaaagaggcttcttggaaacataaccaggaattgcgaaaagccttgcagcagctacaagaagtattgcagaataagagccaacagcttcgtgcctgggaggctgaaaaatacaatgagattcgaacccaggaacaaaacatccagcacctaaaccatagtctgagtcacaaggagcagttgcttcaggaatttcgggagctcctacagtatcgagataactcagacaaaacccttgaagcaaatgaaatgttgcttgagaaacttcgccagcgaatacgtgataaagctgttgctctggagcgggctatagatgaaaaattctctgctctagaagagaaagaaaaagaactgcgccagcttcgtcttgctgtgagagagcgagatcatgacctagagagactgcgcgatgtcctctcctccaatgaagctactatgcaaactatggagagtctcctgagggccaaaggcctggaagtggaacagttatctactacctgtcaaaacctccagtggctgaaagaagaaatggaaaccaaatttagccgttggcagaaggaacaagagagtatcattcagcagttacagacgtctcttcatgataggaacaaagaagtggaggatcttagtgcaacattgctctgcaaacttggaccagggcagagtgagatagcagaggagctgtgccagcgtctacagtgaaaggaaaggatgctgcaggaccttctaagtgatcgaaataaacaagtgctggaacatgaaatggagattcaaggcctgcttcagtctgtgagcaccagggagcaggaaagccaagctgctgcagagaagttggtgcaagccttaatggaaagaaattcagaattacaggccctgcaccaatatttaggagggagagactccctgatgtcccaagcacacatctctaaccaacaagctgaagttacccccactggccgtcttggaaaacagactgatcaaggttcaatgcagataccttccagagatgatagcacttcattgactgccaaagaggatgtcagcatacccagatccacattaggagacttggacgcagttgcagggctggaaaaagaactgagtaatgccaaagaggaacttgaactcatggctaaaaaagaaagagaaagtcagctttacccctcaaacatgggagaaaaagtttcagcattttaattcaaattggtaaaaggctgagcaacccttaaagctgccataatggaagaagactgtgagctagcttaaaaaagagagaatgaaggggaagaaacaaaacccctgtgtggcagagtgtcgagatgagatgagcatttatttgtctccgtcgaattccttacggagataaggtgcagctgcaggggatgacaccgaagatacaagcactgagttcactgacagtattgaggaggaggctgcacaccatagtcaccagcaagtaagtcagtgtcagggtctgggacttccagggtggacagcacacagcccttctgaggtctgatagtctcctgcagcccttgcggacttagtgagaagatatctttttacataaactacttctcagtcatctacctgttctccttgaacttcccagctgcctttccaacccatatcttcactccatttttctctccaatccaccctttggtttgtattgtatctctttcttctgcttccttccccctcctacccacctttgcccctatttattctctgtagctatagcttcagaagcatttttacttgcaagacgatggacacattccccttgggctttttgtaactgaaatgcatcacagaagacagggagtcatcgaagggctgctcggggaggtggcagggcggaggaactgcttgggaagaaactccaagaagattggaatgcttccaaagcaagaatctttctcagtgaaatctcattatacaaagagaaccttatgcaacctgacaaaccactgaggtcatggtgactcagtgatcagcagatggtacttcaacagcaatcccctgtcaaacctcagaacttgaggctgaaacattgcttccacccaccatcagtgaagatgtaactagcatgttacaagagtgaataatctggacttcagagattaagtcaccaatagtgatctcacaagtactcaccggaactcctataatgtctccactttgtccatgccatttagcaatctcatctcctaaatggactgtgcctatgattcttaaggagaaagtgaatcattggtagatatcctgcacaagcagctggactttccagtaatagctttcttggggctattaggaaaattaaacaagaaatgaggctttctgggtctgcctgtatgtcttctgcataagaaaaagaagagacatcgaatcaaccaataagaagagcccaaataagcatcctcaaatcttttgggatttggcacttggggacatgagtagttgtctgggatacgtcatattctcaacagtttctttgtagtagtaggatcaccttcttataataggatcaccttcttgttgctatagctgtacccgaccttcccttctcccttgagtgcttgcatgagctccacttttccttttgcttgaacagcttctcctgagtcctccttaccgatggttgtgactttaattatatacatctctgtccctccagacagatccctctgtcctcactctctgatttcattgaggatcttgggtgagagagagggacctgcaggatgaacaaatgtctactctaagacagctagattgggaggttggctggtcactgatggttataatgactgtgggacaggattaacttcagaataaatgaacaggagacacagatgtgaagaaagtttctgattgatatggtctgaagtactcctggtattgcaagtcatttgctctaattctcaattgtaggcaaactgatttgtaaatttgcttcttcagccttctttcctgtagcctagcatggagaatctgaccagaccccattttgagaaggtcagcctacactggaatgaactttttacattagggcatttgtatttccctcacaatacttgccacattacttggcataggagagatgcttagtgtaattatgagttaacaagcctttggatcagggcttgactcatgatagacaaagtatatgcctgctggatggaagaatctcttgggcgagcaccatttttctttccatcacctttccttgaaaatatatcttcagctttgggtaggaggaatcttggtgtatgaaatcattgcaaatttacttcatcttttctggagtttgaagttgtgactctcctgctaccaattaaataaagcttactttgccataac

SEQ ID NO: 162 - DNA, 417 bp, Homo sapiens
tttttttttttttttttacactatctgcaatgaacttggtttattgttagagttggaggtggctccgttacagcagctgggaactatagcagggaagcgtggggaggagcagaacacagcagcacggggagggtggagctaggaagaacacaaggtgggctcattttggtttcccagtcgtttggcagagaaggcaagcccacatgactaccagcttctgggtttctcagactggcagtagtctggcagggctgctcactggcttgcttggggcgaggtcctctcccggggtggtattttcagcccgttttcatttcactctgttagagttaagctgtggctcagcttctccctttttccttcctccagctcattttccccaagtcctctgggctggcttccacctcccagatcctc

SEQ ID NO: 163 - DNA, 542 bp, Homo sapiens
  misc_feature (59)..(60): n is a, c, g, or t
aaaaaaaggagggggagtagggggaagaaaataattttcctttattaaaatgtactgtnncaatataaaagaaattttgttctttttaaaaaataggtagaatcacctgcatcatgtaatggccgtaattgtgtccagcagatatttttaaaaaagaaaagacagtgaacagaaactgctacctaaggattctagaggcaatgagacacagagtcctgtttttcaggacagaccgtattgcccaagcctctaagcatttacggagcataaattaagaatcttgttttgccttgagtctcaccatgaaataatgacacggtagccacatttggctggagggcctaatatgtaccaggcattgtgctaagtagtttcatatccatgtctcatttattccgaacttttttcctcagggagagaaaaatcaattacagtcttgttcataggaaaaaccaaacttacaattttgggaaagccagaacatgtacagtagaggaggaggcctcaagctacttacagaattctaagagctgtggtgctat

SEQ ID NO: 164 - DNA, 4826 bp, Homo sapiens
agctgagcccgagcccagaccgcgcccgcgccgccatgcccctggccttctgcggcagcgagaaccactcggccgcctaccgggtggaccagggggtcctcaacaacggctgctttgtggacgcgctcaacgtggtgccgcacgtcttcctactcttcatcaccttccccatcctcttcattggatggggaagtcagagctccaaggtgcacatccaccacagcacatggcttcatttccctgggcacaacctgcggtggatcctgaccttcatgctgctcttcgtcctggtgtgtgagattgcagagggcatcctgtctgatggggtgaccgaatcccaccatctgcacctgtacatgccagccgggatggcgttcatggctgctgtcacctccgtggtctactatcacaacatcgagacttccaacttccccaagctgctaattgccctgctggtgtattggaccctggccttcatcaccaagaccatcaagtttgtcaagttcttggaccacgccatcggcttctcgcagctacgcttctgcctcacagggctgctggtgatcctctatgggatgctgctcctcgtggaggtcaatgtcatcagggtgaggagatacatcttcttcaagacaccgagggaggtgaagcctcccgaggacctgcaagacctgggggtacgcttcctgcagcccttcgtgaatctgctgtccaaaggcacctactggtggatgaacgccttcatcaagactgcccacaagaagcccatcgacttgcgagccatcgggaagctgcccatcgccatgagggccctcaccaactaccaacggctctgcgaggcctttgacgcccaggtgcggaaggacattcagggcactcaaggtgcccgggccatctggcaggcactcagccatgccttcgggaggcgcctggtcctcagcagcactttccgcatcttggccgacctgctgggcttcgccgggccactgtgcatctttgggatcgtggaccaccttgggaaggagaacgacgtcttccagcccaagacacaatttctcggggtttactttgtctcatcccaagagttccttgccaatgcctacgtcttagctgtgcttctgttccttgccctcctactgcaaaggacatttctgcaagcatcctactatgtggccattgaaactggaattaacttgagaggagcaatacagaccaagatttacaataaaattatgcacctgtccacctccaacctgtccatgggagaaatgactgctggacagatctgtaatctggttgccatcgacaccaatcagctcatgtggtttttcttcttgtgcccaaacctctgggctatgccagtacagatcattgtgggtgtgattctcctctactacatactcggagtcagtgccttaattggagcagctgtcatcattctactggctcctgtccagtacttcgtggccaccaagctgtctcaggcccagcggagcacactggagtattccaatgagcggctgaagcagaccaacgagatgctccgcggcatcaagctgctgaagctgtacgcctgggagaacatcttccgcacgcgggtggagacgacccgcaggaaggagatgaccagcctcagggcctttgccatctatacctccatctccattttcatgaacacggccatccccattgcagctgtcctcataactttcgtgggccatgtcagcttcttcaaagaggccgacttctcgccctccgtggcctttgcctccctctccctcttccatatcttggtcacaccgctgttcctgctgtccagtgtggtccgatctaccgtcaaagctctagtgagcgtgcaaaagctaagcgagttcctgtccagtgcagagatccgtgaggagcagtgtgccccccatgagcccacacctcagggcccagccagcaagtaccaggcggtgcccctcagggttgtgaaccgcaagcgtccagcccgggaggattgtcggggcctcaccggcccactgcagagcctggtccccagtgcagatggcgatgctgacaactgctgtgtccagatcatgggaggctacttcacgtggaccccagatggaatccccacactgtccaacatcaccattcgtatcccccgaggccagctgactatgatcgtggggcaggtgggctgcggcaagtcctcgctccttctagccgcactgggggagatgcagaaggtctcaggggctgtcttctggagcagccttcctgacagcgagataggagaggaccccagcccagagcgggagacagcgaccgacttggatatcaggaagagaggccccgtggcctatgcttcgcagaaaccatggctgctaaatgccactgtggaggagaacatcatctttgagagtcccttcaacaaacaacggtacaagatggtcattgaagcctgctctctgcagccagacatcgacatcctgccccatggagaccagacccagattggggaacggggcatcaacctgtctggtggtcaacgccagcgaatcagtgtggcccgagccctctaccagcacgccaacgttgtcttcttggatgaccccttctcagctctggatatccatctgagtgaccacttaatgcaggccggcatccttgagctgctccgggacgacaagaggacagtggtcttagtgacccacaagctacagtacctgccccatgcagactggatcattgccatgaaggatggcaccatccagagggagggtaccctcaaggacttccagaggtctgaatgccagctctttgagcactggaagaccctcatgaaccgacaggaccaagagctggagaaggagactgtcacagagagaaaagccacagagccaccccagggcctatctcgtgccatgtcctcgagggatggccttctgcaggatgaggaagaggaggaagaggaggcagctgagagcgaggaggatgacaacctgtcgtccatgctgcaccagcgtgctgagatcccatggcgagcctgcgccaagtacctgtcctccgccggcatcctgctcctgtcgttgctggtcttctcacagctgctcaagcacatggtcctggtggccatcgactactggctggccaagtggaccgacagcgccctgaccctgacccctgcagccaggaactgctccctcagccaggagtgcaccctcgaccagactgtctatgccatggtgttcacggtgctctgcagcctgggcattgtgctgtgcctcgtcacgtctgtcactgtggagtggacagggctgaaggtggccaagagactgcaccgcagcctgctaaaccggatcatcctagcccccatgaggttttttgagaccacgccccttgggagcatcctgaacagattttcatctgactgtaacaccatcgaccagcacatcccatccacgctggagtgcctgagccgctccaccctgctctgtgtctcagccctggccgtcatctcctatgtcacacctgtgttcctcgtggccctcttgcccctggccatcgtgtgctacttcatccagaagtacttccgggtggcgtccagggacctgcagcagctggatgacaccacccagcttccacttctctcacactttgccgaaaccgtagaaggactcaccaccatccgggccttcaggtatgaggcccggttccagcagaagcttctcgaatacacagactccaacaacattgcttccctcttcctcacagctgccaacagatggctggaagtccgaatggagtacatcggtgcatgtgtggtgctcatcgcagcggtgacctccatctccaactccctgcacagggagctctctgctggcctggtgggcctgggccttacctacgccctaatggtctccaactacctcaactggatggtgaggaacctggcagacatggagctccagctgggggctgtgaagcgcatccatgggctcctgaaaaccgaggcagagagctacgaggggctcctggcaccatcgctgatcccaaagaactggccagaccaagggaagatccagatccagaacctgagcgtgcgctacgacagctccctgaagccggtgctgaagcacgtcaatgccctcatctcccctggacagaagatcgggatctgcggccgcaccggcagtgggaagtcctccttctctcttgccttcttccgcatggtggacacgttcgaagggcacatcatcattgatggcattgacatcgccaaactgccgctgcacaccctgcgctcacgcctctccatcatcctgcaggaccccgtcctcttcagcggcaccatccgatttaacctggaccctgagaggaagtgctcagatagcacactgtgggaggccctggaaatcgcccagctgaagctggtggtgaaggcactgccaggaggcctcgatgccatcatcacagaaggcggggagaatttcagccagggacagaggcagctgttctgcctggcccgggccttcgtgaggaagaccagcatcttcatcatggacgaggccacggcttccattgacatggccacggaaaacatcctccaaaaggtggtgatgacagccttcgcagaccgcactgtggtcaccatcgcgcatcgagtgcacaccatcctgagtgcagacctggtgatcgtcctgaagcggggtgccatccttgagttcgataagccagagaagctgctcagccggaaggacagcgtcttcgcctccttcgtccgtgcagacaagtgacctgccagagcccaagtgccatcccacattcggaccctgcccata

SEQ ID NO: 165 - DNA, 494 bp, Homo sapiens
  misc_feature (387)..(387): n is a, c, g, or t
ccgagtcggcccagggtcccccgggcccggcagcgtcgctggagctgtggctgaacaaagccacagacccaagcatgtcggaacaggattggtcagctatccagaatttctgtgagcaggtgaacactgaccccaatggccccacacatgcgccctggctactggcccacaagatccagtctccgcaagagaaggaagctctttatgccttaacggtgagtttggcttgccttgtagcctaacctttcctgtccttgtgctatagagagccgagaggcgctttgcttcacacagatccttttactggagaggggaggtccctgagaggttaccttaagcagttgagagggggagatctgggccagggtcccaccctcttctcctgtnctcgtctgttctcaggcacattgatctatgtggagacgaaggggaagttttatttatttgccttcttaacagggctggcagtcatgtcttttagagaaggcagttta

SEQ ID NO: 166 - DNA, 2909 bp, Homo sapiens
ggggagcagttccgccgggtttcactgtccgtgacttccttcggggcacctccaggagcaaaccaagatggagtatgagtggaaacctgacgagcaagggcttcagcaaatcctgcagctgttgaaggagtcccagtccccagacaccaccatccagagaaccgtgcaacaaaaactggaacaacttaatcagtatccagactttaacaactacttgatttttgttcttacaaaattaaaatctgaagatgaacccacaagatcattgagtggtcttatcttgaagaataatgtgaaagcacactttcagaacttcccaaatggtgtaacagactttattaaaagtgaatgtttaaataatattggtgactcctctcctctgattagagccactgttggtattttgatcacaactatagcctccaagggagaattgcagaattggcctgacctcttaccaaaactctgtagcctgttggattctgaagattataatacctgtgagggagcatttggtgcccttcagaagatttgtgaagattctgctgagattttagacagtgatgttttagatcgtcctctcaacatcatgattcccaaatttttacagttcttcaagcatagtagtccaaaaataaggtctcacgctgttgcatgtgtcaatcagtttatcatcagtaggactcaagctctaatgttgcacattgattcttttattgagaatctctttgcattagctggtgatgaagaaccagaggtacggaaaaatgtgtgccgagcacttgtgatgttgctcgaagttcgaatggatcgcctgcttcctcacatgcataatatagttgagtacatgctacagaggactcaagatcaagatgaaaatgtggctttagaagcctgtgaattttggctaactttagctgaacagccaatatgcaaagatgtactcgtaaggcatcttcctaagttgattcctgtgttagtgaatggcatgaagtactcagacatagatattatcctacttaagggtgatgttgaagaagacgaaacgattcctgatagtgaacaggatatacggccacgttttcaccgatcgaggacggtggctcagcagcatgatgaagatggaattgaagaggaagatgatgatgatgatgaaattgatgatgatgatacaatttctgactggaatctaagaaaatgttctgctgctgccctggatgttcttgcaaatgtgtatcgtgatgaactgctgccacatattttgccccttttgaaagaattactttttcatcatgaatgggttgttaaagaatcaggcattttggttttaggagcaattgctgaaggttgcatgcagggcatgattccatacttgcctgagcttattcctcaccttattcagtgcctctctgataaaaaggctcttgtgcgttccataacatgctggactcttagccgctatgcacactgggtggtcagccagccgccagacacgtacctgaagccattaatgacagaattgctaaagcgcatcctggacagcaacaagagagtacaagaagctgcctgcagtgcctttgctaccctagaagaggaggcttgtacagaacttgttccttaccttgcttatatacttgataccctggtctttgcatttagtaaataccagcataagaacctgctcattctttacgatgccataggaacattagcagattcagtaggacatcatttaaacaaaccagaatatattcagatgctaatgcctccactgatccagaaatggaacatgttaaaggatgaagataaagatctcttccctttacttgagtgcctatcttcagttgccacagcactgcagtctggattccttccgtactgtgaacctgtgtatcagcgttgtgtaaacctagtacagaagactcttgcacaagccatgctaaacaatgctcaaccagatcaatatgaagctccagataaagattttatgatagtggctcttgatttactgagtggcctggctgaaggacttggaggcaacattgaacagctggtagcccgaagtaacatcctgacactaatgtatcagtgcatgcaggataaaatgccagaagttcgacagagttcttttgccctgttaggtgacctcacaaaagcttgctttcagcatgttaagccttgtatagctgatttcatgccaatattgggaaccaacctaaatccagaattcatttcagtctgcaacaatgccacatgggcaattggagaaatctccattcaaatgggtatagagatgcagccttatattcctatggtgttgcaccagcttgtagaaatcattaacagacccaacacaccaaagacgttgttagagaatacagcaataacaattggtcgtcttggttacgtttgtcctcaagaggtggcccccatgctacagcagtttataagaccctggtgcacctctctgagaaacataagagacaatgaggaaaaggattcagcattccgtggaatttgtaccatgatcagtgtgaatcccagtggcgtaatccaagattttatatttttttgtgatgccgttgcatcatggattaacccaaaagatgatctcagagacatgttctgtaagatccttcatggatttaaaaatcaagttggcgatgaaaattggaggcgtttctctgaccagtttcctcttcccttaaaagagcgtcttgcagctttttatggtgtttaatctaatacacttaagctgcagtcccaaaattaggggtccttcagtcttggagactataagggagcctctgcacccagggaaaatgttaccctttacaggggggaagggtaaaccagtagggaatacagtacaatcccaaccctactggagggcggggaggggaggtgtt

SEQ ID NO: 167 - DNA, 2311 bp, Homo sapiens
cggtactctgagtgcagtcagtcctcggcgctgttttccctgatttgctgtcgacgccaggaaggaaggacgcgtgcagaggaccgcagaggggtggccgtggctgagaggagacagcgccgcagcactgagggtttgggcttgcaggcgctgcaggagacgcccaggcggagtcttgtctcgcagccagctctgagcgggaggcctgagcgggaagcattggcgtccgagcgacttctaggagcctggggttcggcgctatggaggagctcgatggcgagccaacagtcactttgattccaggcgtgaattccaagaagaaccaaatgtattttgactggggtccaggggagatgctggtatgtgaaacctccttcaacaaaaaagaaaaatcagagatggtgccaagttgcccctttatctatatcatccgtaaggatgtagatgtttactctcaaatcttgagaaaactcttcaatgaatcccatggaatctttctgggcctccagagaattgacgaagagttgactggaaaatccagaaaatctcaattggttcgagtgagtaaaaactaccgatcagtcatcagagcatgtatggaggaaatgcaccaggttgcaattgctgctaaagatccagccaatggccgccagttcagcagccaggtctccattttgtcagcaatggagctcatctggaacctgtgtgagattctttttattgaagtggccccagctggccctctcctcctccatctccttgactgggtccggctccatgtgtgcgaggtggacagtttgtcggcagatgttctgggcagtgagaatccaagcaaacatgacagcttctggaacttggtgaccatcttggtgctgcagggccggctggatgaggcccgacagatgctctccaaggaagccgatgccagccccgcctctgcaggcatatgccgaatcatgggggacctgatgaggacaatgcccattcttagtcctgggaacacccagacactgacagagctggagctgaagtggcagcactggcacgaggaatgtgagcggtacctccaggacagcacattcgccaccagccctcacctggagtctctcttgaagattatgctgggagacgaagctgccttgttagagcagaaggaacttctgagtaattggtatcatttcctagtgactcggctcttgtactccaatcccacagtaaaacccattgatctgcactactatgcccagtccagcctggacctgtttctgggaggtgagagcagcccagaacccctggacaacatcttgttggcagcctttgagtttgacatccatcaagtaatcaaagagtgcagcatcgccctgagcaactggtggtttgtggcccacctgacagacctgctggaccactgcaagctcctccagtcacacaacctctatttcggttccaacatgagagagttcctcctgctggagtacgcctcgggactgtttgctcatcccagcctgtggcagctgggggtcgattactttgattactgccccgagctgggccgagtctccctggagctgcacattgagcggatacctctgaacaccgagcagaaagccctgaaggtgctgcggatctgtgagcagcggcagatgactgaacaagttcgcagcatttgtaagatcttagccatgaaagccgtccgcaacaatcgcctgggttctgccctctcttggagcatccgtgctaaggatgccgcctttgccacgctcgtgtcagacaggttcctcagggattactgtgagcgaggctgcttttctgatttggatctcattgacaacctggggccagccatgatgctcagtgaccgactgacattcctgggaaagtatcgcgagttccaccgtatgtacggggagaagcgttttgccgacgcagcttctctccttctgtccttgatgacgtctcggattgcccctcggtctttctggatgactctgctgacagacgccttgccccttttggaacagaaacaggtgattttctcagcagaacagacttatgagttgatgcggtgtctggaggacttgacgtcaagaagacctgtgcatggagaatctgataccgagcagctccaggatgatgacatagagaccaccaaggtggaaatgctgagactttctctggcacgaaatcttgctcgggcaattataagagaaggctcactggaaggttcctgagaactgcttcaatgtggtatctttgtatggcaatgtatatagatttttttaaaagaataaatgttgttttgcaaatgtag

SEQ ID NO: 168 - DNA, 530 bp, Homo sapiens
ccaacgtttactccccccaaccctcaagctctcaagtggtgaccacgtccttccggccagctgcaggtggagctggagcaagaataccaagacaaattcaaaagactgcccctcgagattttggaattcgtgcaggaagccatgaaaggaaagatcagtgaagacagcaatcacggttctgcccctctctccctgtcctcagaccctggaaaagtgaaccacaagactccctccagtgaggagctgggaggagacatcccaggaaaagaatttgatactcctctgtgaatgctcctgccaggccttcagaaattgcatggccactccagcgtcatcggactctctcttattacaaagatcactgcccaggaccatcttcccgagaagcatcccttagcctaaaatccacaccaaagggagagttccagaggaatccatgaagaattcccatgcccaggctccatgtgtcatgtggaaacctccacaggtctgctagtgaagaatgcatgtatgtgagatttttgttttct

SEQ ID NO: 169 - DNA, 661 bp, Homo sapiens
tttaaatcattcagtttaaggtcactagactttagatgagtgaccctgcaggtttataaggcattctgctcagcagtcttgtaaatagtcctatatgaaagagccatgctactgttggacttggtcccactctggtcaaccttgataacgtcatacgtggcttatggactggatagcactggattccgccgcagccctggccatactgtgccacacgttggaagaactgtgggatgtagaatggagggactccttgtcagacagtgacagcatcatagcatatgcctgcgatttggactttctgtgtaacggctgcttaagttcctctggcacatgggaagtactaaaagaagacagctcagcttcagaatattgattatcttccattttcctcattttgaggctatctgtgaagtgccttatatgatctagagcagaaagtccacttttatattcttcctctttatacctcactggggatgtcttgcaactcatctccaaggcactggtttcttcatagtcatcctcagggttttcctcatgtaaattacttgtcactggttcctttcctgttttgcagtgatatcattggcttcatgctgctcatctaacaacacctcatcttcaacttctttatcatccagcaagtctggattttgac

SEQ ID NO: 170 - DNA, 743 bp, Homo sapiens
atcaccctctgcctggtattcgtgccgaagctcatcaccctgagaacaaacccagatgcagcaacgcagaacaggcgattccagttcactcagaatcagaagaaagaagattctaaaacgtccacctcggtcaccagtgtgaaccaagccagcacatcccgcctggagggcctacagtcagaaaaccatcgcctgcgaatgaagatcacagagctggataaagacttggaagaggtcaccatgcagctgcaggacacaccagaaaagaccacctacattaaacagaaccactaccaagagctcaatgacatcctcaacctgggaaacttcactgagagcacagatggaggaaaggccattttaaaaaatcacctcgatcaaaatccccagctacagtggaacacaacagagccctctcgaacatgcaaagatcctatagaagatataaactctccagaacacatccagcgtcggctgtccctccagctccccatcctccaccacagacatgtgccaccctccttccgagtcatggtctcgggcctgtaagggtgggaggcctgggcccggggcctcccccgtgacagaaccacactgggcagaggggtctgctgcagaaacactgtcggctctggctgcggagaagctgggcaccatggctggcctctcaggaccactcggatggcactcaggtggacaggacggggcagggggagacttggcacctgacctcgagccttatt

SEQ ID NO: 171 - DNA, 39854 bp, Homo sapiens
gatccaagagccaacagtccaacagccaatattattagggaaagtaattctaatatttactaaagcccctaggagaatttcaacaagtatcctacacacgttctgtgtggctgataggaaggattttttttttaagagacagggtctcactccgttgtccaggttggaatgcagtggtgcgatcacagctcactgcagcctcaacctccagggctcaagtgatcctcccacctcagcctcctgggtaactgagaccacgggcatgtgccaccaatcctggctaatttttttaaattttttgtagatataaggtcttgctgttttgcccaagctggtctcaaacttctaggctcaagggattctccaaccttggcctcccaagtagctaggattataggcatgagccaccgtgtccaactccagtgccaagcaggtgatcaagaagtgtttgataggccgggtacagtggctcaggcctgtaatcccagcactttgggagaccgaggagagcagatcacttgaggtttgagatcagtctttccaacatggtgaaaccctgtctctactaaaaatacaaagactagctgggcatggtggtgggcaccagtaattccagctactcaagaggctgaggagggagaattgctagaacccaggaggtggaggttgcagtgagccgagattgctccactgtgctccaggctgggtgaaagagtgacactccatctcaaaaaaaagtgtttgataaatttatttatttaataccgatttattgattgattgatactcttcggagctttccttaatgagccagtttcttccataatgcaatgaatgaaaggacctctcagattcaggcatctgagtgcccgactggagtctgggaccccccagacctctctgcctgggagcttccatgaagctcagcctgagctggaaggagaccgtagggagatgtcctagtgagagtgaatccctagtcactgtttcctcttcttacccactcgatgatcccaaagcacacccatctccaaaagaacaggtcacatgtggcagaggagaaacaaaataattagcatccgcttccttaacaaggagctatggggacgaagtctcctagagtccccagactataaataccctgatgttcccctggctcccccactcacctgcagagtctgggggcgggggggtacacatatgaatccttcccatagacatcaggctaaccccagcgatcacaggtgagtagcccccatgcccttcctaggggtttagtgctgacctcgggatcctctagcagttggtggagaaggaggcttcccgggaccctccccttggtgatgccatcctggtgagcaggtgagggatggggaaaggattgagctgagggtgggggtggagggttgtgggagaggaatctgtctccttcctagaggccgagagagagagaagagactgagaccaagtctagactctctgagtggacaaagcacgcagacggcagaccctctgtggcaggatatgtggaggaaaagcactgagggtctgcagctgcaggacacctgcacagataggagaggtcttgagaaacaagtttctccaatgcagcagctccccaagtgtggtccctgggctagaagcaccagcatcctctggaaactatctagaagtgctggttcttacaccagacatttcagggaaagggcttagctttttgtgtatgatgagtttgggagcgggggggagggggcggggggattgttttgtttgtttgtttgttctttctgtttttgagacagggtctcgctctgttgcccagtctggagtgcagtggcattatcatagctcatcgcagcctcgacctcccaagctcaagtgatcctccctcctcagcctcccgggtacctgggataacagacatataccaccatgcctggctaattttattttcgtagaggcagggatcttcctatgttgcccaggatggtctcacactcccgggctcaagagatcctcctaccttggccccccaagcagctgggactaacaggtgtgtgccaccatgtccagctaattttttattttgtagagatgggggtctcactgtgttgcccaggttggtctctaactcctggactcaagggattctcccacctcagccttctgagtagctgggactatggaagcatgccaccatgcccagcagattgttttattttttgtagatccagggcgggattgggggtggggtggcctcactttgtctgccaggctggtcttgaactcctggcctcaagcaattctcccacttcagcctcccaaagtgctgggattacaggtgtgagccaccatgcctggcccgctttttgtgttttaacaagccttccaggtgaccctgaagcgtgctcaaggttgagaaccgctgctctatgcaacccaagtcaacaactgaggactgttacaaatatgttgccaggaagggaatcgcagtattctatccagcctagagaaaaccaagcattgcattgcaaaaacctcaagtccaacactaaaaagcctcaaaaagttaacatagggctttgctgaaggcctcttggggttaccaaggagattatgctgctaaccttcctaaaaacccctttcatcggctgggcgctgaaatgatgagattactgggctcacgcctgtaatctcagtactttgggaggccaaggtgggcggatcaccgggtcaggagttcaagaccagcctggccaacaggcttagtagaggcgaaaccccgtctctactaaaaatacaaaaattaatcgggcgtggtgatgcacacctgtaatcccagctattcgggtggctgaggcacaagaatcacttgaacccaggagacggatgttgcagtgagccgagatcgtgccactgtactctagcctaggtgacagagtgagactctgtctcgaaaagaaacacgtgtaaatgcttgtaattgaatatttttcccttgcacgtgttgacagcacagaatttagcttcgaaatgcctcataaagaggtgagagtggccattcttagggaggcagtggagtatgagagtgaaaataagtctaaattcaaaggcgagatcaggcacttgcaagctgagtgcccctggcagctcgctcagccccagtctgctcactgtaaattgtagctaacacaatctccctgtgggagttattgtaagacctatgcattaagaaactggctcctggctggctgcagtggctcacgcctgtaatcccagcactttgagagatcaagccgggcagatgatgaggtcaggagttcaagaccagtctgacaaacatggtgaaaccccatctctactaaaaatacaaaaattagccatgcgtggtggtgctcgcctgtcatcccagctactcaggaggctgaggcaggagaatcttttgaacccaggaggcgggggttgcagtgagccaagatcgcgccactgcactccagcttgggtgacagagtaagactccatctcaaaaaagaaaagaaagaaagaaaccggctcctcatcaggataaatagctaatgcatgctgggcttaataccgaggtgatggcttgataggtgcagcaaaccactatggcacacgtttacctatgtaacaaacctgcacgtcctgcacgtgtatcctggaacttaaaataaaatgataaaattaaataaaataaaaatcatgctgagcagccaatagctgggggaaaaaaaaagaaagaaactggctcctaagaaggtttaacccattacagatatcattattgctgagggcaaaataaaaacacctgtcccagctactaggaaggctgaggtgggaggaacacctgagctcaggaggtacaggctgcagtgagctgtgattgtgccaccgcactgcagcctgggtgacagagtgagaccctgtctcaaaataaattaaattaaattaaatagatcttgtattagataattttgcctaactgtaggctaacgtaagtgttctgagcacattgaaggtgggctaggctaagctgtgatgtttggtaggttaggtatgttcaatgcatttttgacttatatatatatatatatatatatatatatatatatatatatatatatttttttttttgagacagagtttcgctcttgttgccaaggctggagtacagtggctcaatctcagcccactgcaacttctgcctcccaggttcaagcgattctcctgcctcagcctcccaagtagctgggattacaggcatgcaccacaacgcctagctaattttgtattttcagtagagacggggcttcaccttgttggccaggctgacctctcaaactcctgacctcaggtgatccccctgcctcggcctcccaaagtgctgggattataagaatgagccaccacgccaggtctgacttatgacattttcaatgtatgaccccattatcagcctcagaacatctgtacctatcatttcttggtggtgagaacataaaattgactctgagtttctctggtatacaatgcattgttattaactatagtcactatgctgtacaatagatctcttgaattatgcctcccatctaattgaaattttgtattctttgatcaatatctccctaacacccacctcccgcccccagcccctggtaaccaccattctactctgcttctatgagattggccattttaaattccacatataagtgagaccatgtggtatctgtctttctgtacctggctattttatgtaacagaatgtccttcagtttcatctatatggttgcaaatgatagaatttcctcttttttccatggctgaataaatagtattccattgtatattcctaccacattttctttatccattcatcggtttttaacacaaaactgatgttaaagattacatattgttggtggaaggatgaaggggaaggagggttgaggggggaggaaagaaaagagggagatggccaggcgcggtgcctcatgcctgtaatcccagcaccttgggagtccaaggcgggtagatcacttgaggtcaggagttgagaccagcctggccaacatggtgaaagcccgtctatactaaaaatacaaaaattagccagtcatggtggtgcgtgcctgtaatccccgctacttgggaggctgaggcacgagaatcacttgaacccaggaggcagaggttgtagtgagctgagatcgtgccactgaactccagcctgggtgacagagcaagactctgtctcaaaaaaagaaaaaggaaaaagaaaacagggagagaacacaggaaaggaagagaaggaaaaacagaagatggtcaggttccctttactgtatagagtttttgttgaggtttgattctgcttgattttctttttttatttttgttttttgttttttgtttgagacagaatcttgctctatagcccaggctagagagccgtggcacaatctctgctcgctgcaaactttgcctcccgggttcaagctattcacctgcctcagcctctagagtagctgggattgcaggcgcccaccaccacgcctgattaatttttttgtatttttagtagagacggggattcaccatgttggccaggctggtctcgaactcctgacctcaagcaatctgcccgcctcagccttccaaagtgctgggattacaggcgcgggccacttggttttgttttctatgaagctttgctccactgaaggaagcaaaagtgtttatagagaacatccaagttgactatgagcgactccgttagatccttgagaccctgactgtctcaggcatgaatgacttggcttgaggagcaacagaagcccactgaagatggcttgaggttaactgaacacaaaggaatttgatggatttgatggaattttcacagaacagtataggtttccgtgggaagctgggaccagaatggcatctctgacacctggctctgtgtggtttttctccctttttgttcccactagtcacagaccatacatggaaccagaaaagcaaaccgaaatctcagaattcttcctccagggactctcagaaaagccagagcatcagaccctcctcttcacaatgttcctctccacatacctggtcaccatcattggaaatgccctcattatcctggccatcatcacggactctcacctccacacacccatgtacttctttctcttcaacctctcactcgttgacaccctattatcctccaccaccgtccccaagatgctagcgaacatccaggctcagagcagagccatcccctttgtgggctgcctcacccagatgtatgccttccacctgttcgggaccatggacagctttctcctggcagtaatggccatcgaccgcttcgtggccattgtccacccacagcgttacttggttctcatgtgctcccctgtctgtgggctgctgctgggagcatcatggatgatcaccaacctccagtctctcatacacacctgcctcatggctcaactgaccttctgcgccggctctgaaatctcccacttcttctgtgacctcatgcccctgctgaagctctccggctcagacacgcacaccaacgagctggtgatctttgcttttggcattgtcgtgggcaccagcccattctcctgcatccttctctcgtacatccgcattttctggacagtctttaagatcccttctactcggggcaagtggaaagccttctccacctgtggcttacacctcactgtggtgtcactgtcctatgggaccatctttgctgtgtacttacagcccacatcccccagctcctcccagaaggacaaggcagccgccctaatgtgtggggtgttcatccccatgctcaacccctttatctacagcatacggaacaaggatatgaaggcagccctggggaagctcatcggcaaagtggccgtcccctgtcctaggccagaacagttattggatgtttatcatgttccaggatcactgttggctgctagggacacagagatgcatcccatcccctaccctggaggagttcagagtctagctgggaacagagacatggaataaatccttccagtacaacgtgataaatgtgtcataaagagatgaacaaagtgtatgagcacccaaaggaaaggtgtgcattttccccaggatttatcttccccaaaaagatcagaatagcaaggatcaaactggcctgaaattagccctcctggaggatcagccttttaggattgctatgtgaataagagtagttgaaaacaagagacgtagctacactcattttagtattgacaaaggccaggtgtggaagctcaagcctgtgatcccagcattttgggaggccaaggtggaaggatcacttgaggccaggagtttgagaccagcctgggcaacatacagagaccctatctccacacacacacacaaaatcactttagcaagacatggtggtatacgcctgtagtctcagctaatcaggaggctgaggcaggcagatcatttgagcccaggagttcaaggttgcagtgagctatgactgcaccactgcacttcagcagtttgggaaactgagcaagatctgtcactcataggtagatagatagatagatagatagatagatagatagatagatagatagacagacagatagatagagaggataagataagataggtagatagggtggatagataagatatgtagatagatagatagatagatagatagatagatagatagatagatagatatacagatagatacatagatagataggatagataggtaggtaggtaggtaggtcaaccgatcgatagatctatctattgacagacagatagatgattgattgatagatagatcatataagtagatagatgatagatagatagatagatagatagatagatgagataggtaggtaggtcagtcgatcgattgatcaatcgatcaacagatagatgatagatagatggatggatagatagagatagaggaggtaggtagatagatagatagatagataggtagatacagacagcccatgtattagccagtgtttcctaagtgttgtggaagaactttgaaaatatttgcaagtgagattagctcacgtgctgttcgcttagtcagccagcaagcctcagcctcctggggggtcttgagacctccacttgtaactatgactgtggttggggcttactttctcaattcccaacaggcttcctgtctccccacaacccccagtcaaggggactctgatgcagacggtccatcaatcgtagtttgggaacacagaccctagcctagctccaaaatctatgtgtttcctgtgacattcatcgcctgactctgaacccagtatgattctacacgcagggtcagccacagcagatcaggtggcccggggcacttaaaaagttagtgttatgggttgaactgtggctcccaaaaaaagatacgtgggaggccaggcgcagtggctcacacctgtaaactctggcactttgggaggttgagtagggagaatcatttgaagctaggagttcaggaccagcctgaacaacatagtgagatctcatccctacaaaaaataaaaatgaaaaaagaaaaaattacctgggtgtggtggtgtgcacctgtcatcttagttactcgggaggctgagacaggaggacctcttgagccaaggaggtcgaggctgcatgagctatgttcctgccactgcactccagcctgggaaacagagcaaggccctgtctgcaaaagtaataataataaaataaaaaagatatgttgaagtcctaaccccaaggacctcagaatgtgaccatatttgaagatagggtgtttacagaggtcattagattacagtaaggtcattaggttggtccctaatctgatacgactggcgtccttatgaaaaggggagatttggacacaggcacccacacacatggagaccgccacatgaagatggaggcagagattggggtgatgctcctacaagccaaggaatgccagggactgcctgcagaccaccagaagccaggagaggcgtggaacaggctatccctctcagccctcagaaggaaccaaggaatcaaagctgctgacaactgatcttttttttttttttttttttttgagacggagtcttgctctgtcatcccggctggatgcagtggcatgattttggctcactgcaacctccacctcccaggttcaagcaattctcctgcctcagcctcccaagtagctgggattacaggcacccaccaccacgcccagctaattttgtgtttttagtagagatgggatttcactatgttggccagactggtctcaaactcctggcctccagtgatctgcccacctcagcctcccaaagtgctgggattacaagcgtgggccactgcacctggcccaacaccttgatctcggactcttaacctccagaactgtaagacaacaaatttctattgtttaagtcacctagttcatggtaatttttaaatttttttttcttttagagacagacaggatctactgtgtcacccaggctggagtacagtggtgcaatcatagctaaagtgcaacctcacctcaaactcctgggctcaagcaatcctcctgcctcagcctcctgagtagttgggactacaggcctatgccactgcaatcagctatatatatttgtagagacagggtctcactatgttgcccaggctggtctcaaactcccggcctcaagagatctgccctcctcggcttcacaaagtgctgggattgcaggtgtaaaccaccacactcggcctgatttgtggtactttgttgcaacattgctagaaaacaaatgcagttagtttaagaaatgtcagcaacctacaaaacctacaaagtgtcccagtacatcctctcaagtttacaattgaccatgtgttctggccaagggaccctgggctagaactggagaaaaggatgaaggatttagattgcatggattcacttactgggtatcagcatgatgacaataatgatgatgacaaccgagatttattatctgaacaatgctaactcctttatatgcacaatctcaataagtgttaagcaacacccctacaaggtaggtgcagaagtaattgtggttttgccactgaaagtaacagcaggctgcgcatggtggctcacacctgtattcccagcactttgggaggccgaggcgggcagatcacaaggtcagtagatcgagaccatcctgaccaacatggtgaaaccccctctctactaaaaatacgaaaattaggccgggcacagtggctcatgcctgtaatcccagaactttgggaggctgaggtgggcggatcatgaggtcaggagatcaagaccatcctggctaacatggtgaaaccccatctctactaaaaatacaaaaaattagccggacatgttggcgggcacctgtagtcccagctactcgggaggctgaggcaggagaatggcctgaacccgggaggcggagcttgcagtgagccaaggccacgccactgcaccccagcctgggtgacagagcgagactcctcctcaatttaaaaaaaaatacaaaacttagccaggcgtggtggcccacacctgtagtcccagctacttgggaggctgaggcaggagaatggcgtcaacccgggaggcggagtttgcgtgagccgagatcgccccactgcactccagcctgggtgacagagcgagactctgtctcaaaaaaaaaaaaaaaaaaaaaaaaaagtttgtaatttaaaagtttgagcatcactgggctagatgggggtcctgtagataaccgggacccaaataggctttaggtacagagatacaggagaaccagatttggggtgccgctctagccactgtgtccaggagggaaccttcccaaccgccctaaaagctctgaaaactacagttagagaagtggccactaggtggcaataatgtcatttcacaaattggatttaaaacgctttttttttttttttttttttttggtttttggttgttttttttttttccccggaaacttgtattctagctgtgaactggcccaggtccatggcccttaggtgtaatctccccctggaagggcacaacaggtgcaaagtttccatgatgagaaggagcctgtgttgtttaaagaaatcacggagactggtgtggcctgagcccagagtgacagggaagctgggtttgcagggggcccgtggagggcactgggagtaacacggtgtgtggaccacggggagtgggaccatgacaaggtttaaggaggatagggggtggggctgtgcttcagaacgaacctgccagttatccatgccatagatctggagtcagcaaactttttctgtcaaggtccaggtcgtcaatattgtcagctttagggaccttaccatctccgttgcaatgactgaactctgctgctgtctggcgaaagcagccatagatgagacatcaacgaatgggcttggctgtgttccactaaaactttgtttataaacacagaagcttccatttcatatcatagtacatgtcataccttgtagcctttgggtttgttttcaaccacttttaaaatgttaaaactactctaggccaggtgcattcactcatgcctgtaatcccagcactttgagaggccaagggaggaggattgcttgaagccaggagttcgagactggagtgggcaacatagtgagacctcccccatctctacaaaaattttttaattagctgggcatggtggtgcatgcctgtagtctcagctactcaggaggctgaggaaggaggatcacttaagcccaggaggtcaaggctgcagtgagctatgattgcaccaccgcactccagcctgggggatagagtaagaccactgtctctaaaaaacttaaaaaataaataaataaataaaaataaatgcaaaactatttttatttcaagggctggatttagcctatgggccataggttgccaatcctcgtatagatggatgggagtgacaagagttaaggggaccaagaaagaccaaaaagtgagaggtgaagtgggctgaaaaccatcagaagataaggagctggtgccacaggacctttgcaaatgctgttccctcttcctgacccctcctgagtaaattcctgcttggcattgagatttcagcacaaactccacttcctcaaggaagcctcccctaacctccatcccttgcccagctacatcagttgccctaatgttacactcgctatcccctctctcatcatcactcatcattagtgatctcttcatcactgcagtggttttgtggggtcttttgttttgttttgagacagagtcttgctctgtctcccagtctggagtgcagtggggcgatcccggctcactgtaacccccacctcctgggttcaaatggttctcctgcctcagcctcccgagtagttgggattacaggcacgcatcaccatgcctggctaatgttttgtatttttagtagaaacggggttcaccgtgtttgccaggctggtctcgaactcctggcctcaagtgatccacctgcctcagccccccaaagttctgggattacaggtgttagctgctgcacccggcctcctcactgcagtggttttatattagtttgtgtaaccctttgattaatgtctgtttcacccatttgactgagctgggagctgggacctgaaatagtgttatcttgtttatctttgcacctctgtgcccctatgattagtacggtagccactcaatgtatgttttctggccacgcaccgtgcctcacacctgtaatcccagcactttgggaggtgaaggcgggcaatcacctgaggtcaggagttcaagaccagcctggccaaccacggccaacgtgatgaagccccatccctactaaaaatacaaaaattagccaggcgtggttgcacgtgcctgtaatcccagctactcaggaggctgaggcaggagaatcgcttgaacccgggaggcaaaggttgcagtgacccaaaatcatgacactgcactccagcctgggcgacagagcaagactcttgtctcagaagaaaaaaaaaaacaaaaaacactttttttctttattttaatttaatcttattttattttatttattttattttttgagatggactctcactttgtcgcccaggctaaagtgtagtggtgtgatcttggctcactgcaacctccgcttcccgtgttcaagttattctcctgcctcagtctcccaagtagctgggactacaggtgcccgccaccatgcccagctaatttttctatttttagtagaggcggggtttgaccatgttggccaggctggtcccgaactcctgacctcaaataatccacccacctcagcctcccaaagtgctgggattataggcatgagccaccgcacccagccacaaaatatattttctgaatgaatgaatgaatgaggcagtgtgatggaaaggttttaggaataccggatggggcagccaaagtaggctgctgagttggaacaaagatacctgcagtcaaggttaagtgagagatgcactcctcctttgatatccccaaccttcagttatgcctgtcccacactcaggtgccttgtgggactgggactctgctgaaattaagaagccaggggcctcatcccacagagcaaaaccagcaagatggcgggactccttaattcagcaacaacaaaagacagaaaataatctggaaattctctaaaatcttagcaagcatgctggaagaggtttgagccaatcttatccagtaaattttttttttttttttttttgagacagggtctcgctctgtcgcccaggctggagtgcagtggtgtgatcatggctgaatgcagcctcgacctcctgggctcaagcaatcctcccacctcagcctcctgagtagctagggctataggcacgcaccaccacacatggctaattttttttacttttttatagagacgaggactcactatgtggcctattccggtcttgaactcctggcctcaagccatcctcccaccttggctcccaaaccgctgggattacaggtgtaagccactgcacacggcccaagcctatattaagagtacaagaacagaccgggcacagtggctcacgcctgtaatcccagcactttgggaggccaagatgggtatattacctgaggtcaggagttcgagaccagcctggccaacatggtgaagcccccatctctactaaaaatacaaaaactagccaggcgtggtggcatgcacctgtagctccagctactcaaggctaaggcaggagaatcgcttgaacctgggaggcggaggttgcagtgagccaagattgtgccactgcactccagcctgggtgacacagcaagattctgtctcaaaaaaaaaaaaaaaaaaaagtacaagaacacttccttctctccatgtgaaattttattgggtgattcaaagcaaatctggagattcgggaactgaggctcagagacgaaaagtgaccaccccaaggccacatgccagatctggggcagagtgggggaatccagcccaggctggtgtgacctcaaaacccagcctctccctccctcatgatgctggtagcctcccaggtgggtgacttgcccaaggtcacactgcagcttggagcaactcaaggcctgtcccgggaggagggagcagcccctgtgtgggactctggggagtgaaaagcggacaagccagcaggagtggccactttctggaaagtgtaagaaagattcactaagatttgggctgaagttcgcagagatggattgggacaatcctcccaactgtccatttgccaggaacttggcaggaaatggaggtggttttgtttgtgtaaacctttgtggctggggatcccaaaggcatccctcacctttaatgatttgctagaaagactcacagaactcagtaatgttattatactcatggtttattgcagtaaacagatacagattaaaatctgcaaagggccagccacagtggcttatgcctataatcccaacactttaagtgagagatgcactcctcctttgatacccccaaccttcaattatgcctgtcccacactcaggtgccttgtgggactgggactctgctgaggcaggaggatcacttgaagccagaagttcgagatcagcctgggcaacatggccagaccctgtctctacaaaaaattgtaaaaattagccaggcgtggtgatgcacacctgtagtcccagctacttgggaagctgaagtcggaggatcactcagatctaggagttcaaggttgcagtgagctagaattgcacaactgcactccagatgaggcaacagagtaaccccccccccttttttttttttttgagacagcatctagctctgtcacccaggctgggatgcagtggtgtgatcacagctcactgcaatttctgcctcctgggctcaagtgatcctccctccttggcctcccaaagcaacgggattacaggtgtaagccaccacacctggcccccattaaaaaaaaaaaatctgcaaaggtaaaaggcagatagagcagcatctaggagacaccaggcatgagcttccagctgttccctcccagtggagttgtacagacatagacaatgctgaattctcacagccacaatgtgtaacaacaggtgcagagtgttgctaaccaaggagctgacccaagccttggtgttctgggttgtttttgtttgtttgttttttgtttttgtttttgtttttttgaaacggggtctctctctgtcacacaggctggagtgcagtggtgcgatctcggctcactgaaacctctgcctccagggttcaagcaattctctgcctcagcctcccgaggagctgggattataggcgcccaccaccatgccccgctaattttttgtatttttagtagagatggggtttcaccatcttggccaggctggtcttgaactcctgacctcgtgatccacccgcctcggcctcccaaagtgctgggaggtgttctgggttcttattggaggttggccactgtattacaatagttcccgcttcttcatgaggtttcagttacctgctgtcaacagcagtccaaaaatactaaatgaaaaatttgagaaataaacactttgggttgggcatggtggttcacgcctgtaataccagcactttgggaggccgaggcgggcggatcacgaggtcaggagattgagaccatcctggctaacatggtgaaaccccatctctaataaaaatacaaaaaaaatagctgggtgtggtggcgggcgctgtagtcccagctactcaggaggctgagacaggagaatggcgtgaacctgggaggcagagcttgcagtgagccaaaatcacaccactgcactccagcctgggcaacagagtgagactccatctcaaaaaaaaaaagaaagaaaaagagagagaaaaaaaaataaacaattagtaagtttttttgtgggtacatagtaggtgtatatatttatgaattacatgtcatattttgatacagggatgtacacatcagggtaaaatgggtatccatcccctcaagcatttatcttttgttttacaaacaatctgattatgctctgtaagttattttcaaatgtacaattaaattatttttgactacagtcaccctgttgtgctagcaattcatacgtttttggttttgggttttgagacagtctcactccgtcacccaggctggagtgcagtggcacaatcttggctcactgcaacctccacctcctgcattcaagcaattgtcctgcctcagcctcccgagcagctgggactacaggtgcccgccaccacacccagctaatttttttgcatttttagtagagatggggtttcaccatgttggtcaggctggtctcaaactcctgacctcaggtgatttgcccacctcagcctctcaaagtgctgggattacaggcatgagccactgcgcctggccacaactcatacgttttaaagtgcgtgccattctgagtagtgtgatgaaatcttgcaccattccactccatcccagctgggatgtcaatcctccctttgtttggcacatctgcactgtaaacaccccacccatcagtcccttactagccatggcagttatgagatcgacaaaacacagtatagctagggttctgtactacccacggtttcaggaatctaccgggcatcttggaacatgttccctgcagataatggaggatcactagtgtcctgggactaccataacaaaataccacagcctgggaggcttaaacaacagaaatttattttctcatagttctggaggctggaagttcaaggtcaagttacgttggtagggttgttctgtggcttctctccaggccttgtaagtggctggctgttccctgagacttcacattgtcttccttctatgtgtgcacacatctgtatccaaatttcctcttctcgtaaggcactagtcctactggattaggactcaccctaaagacgtcattttaacgtaattacctctgtctctagctccggggtatttctccgccaactcaccatgactgccacagaagtgctgagctctgcccaaacctgaccggtccctccacctgcattttgtctttcaacgaatgggtctgtatgtgcctgcgggtggttaacccaccaggtaccaaaagcacagcgtatcaggcctgcagccaacgagaaagaaaattggaggaagaaaaatacatacatgtggggctgggtgtggcggctcatgcctgtaatcccagcactttgggaggccaaggtcgggggatcacttgaggtcaggagttcaagaccagcctggccaatatagtgaaaccctgtctctactacaaatacaaaaattagctgggcgtggtggcacaggcctgtaagatcgcaccactgcactccagactgggcgacagagagagaccctgaaaaaaaaaatagaaaaagaaaagaaagggaagggaaagggaagggaagggaagggaagggaagggaaagggaaagggaaagggaaaggggaaggggaaggggaaagggaaagggaaggaaaggaagggaagaaagaaagaaggaaagaaagaagaaagaaagaaggaaagaaagaaagagaaagaaagaaaggggaaggaaggaagtagagagagagaaagaaagaaggaaggaaggagagaaagaaagaaagaaaaggaaggaaggaaggagagagaaagaaagaagaaaggaaggagagggagaaagaaagaaagaaagaaggaaggaaggagaaagaaagaaaggaaggaaggaaggaagaaagaaaatacatacatggccaggagcagtggctcacacctgtaatcccagcactttgggagaccaaagaggaagagaagactctatctccaaatacagtcacattctaagggaccgggagttaagacttcaacataggaatttggcaagggactgaaggggacataatttggcccatgggtgtccaatcttttcatttccctggaccacattggaagaagaattgtcttgggccacacataaaatacactaacactaacagatagctgatgagctaaaaatcgcaaaaaaaaaatctcatagtgttttaagaaagtttacgaatttgtgttgggtcacattcaaagccttcctgggccacatgcagcctgtgggtggcgggttaaacaagcttgatttagcccataacagccacatagtatggctgaccatttgtgtgactgaccttagctactcagcctcaagcccctcgagaggtcaaactgacacagtgaggcccaaggcctccaccataaaacacgtttttggcataaactctctggtgtgacctccaggtatacaaagagactctcatcacacaggatactccaccagcttgaaggcaactcttcaggagccagacaagggctagactttactttggaatgtgcaggagagcccagaagcatgggaggaaggaggcaggagctaagcctgatgtgggatctctgtcaaagccctgcccacccagccacctgtcctcacctgatcagccacctctctgcaggctgctcctgcttcctctggtacacccagcctgtagagtctagggggtccacaccagcacaccaggtctgggagctggacatcagataagctttgtttaagagacagggcctcagctgggcacggtggctcacacctgtaatcccagcactttgggaggccaaggagggcagataacttaaggtcaggagttctactaaaaaatacaaaatctagccaggcatggtggtgggcgcctgtaatctcagctactcaggaggctgaggcaggagaatcgcttgaatctgggaggcggaggtttcagtgagccgagattgcgccactgcacttcagcctgggcaacaagagtgaaaaccctgtctcaagaaaaaaaaaaaaagagagagagagacggggagagacagggtctcgctctgttgcccaggctagaggcagtggtgcagtcatagctcattgaagcctcaaactcctgggctcaagtgatcctcctgcctcagtctccagaatagctgagactacaggtgtgaaccaccatgtccagcttggagagctcttggcatggctgcagtggccagttgctgagtctatccctgaggctgtgcaggggcctagccagcaggaaagctccacagccttgcagctgataaacagagaccactctggaggtggcatggagcaactatggacccctcctgcacctcagtttcagctctatagctgtctggccagatttttccaagggtcaatgggaggctctggtcaagcaatgctgtaccactgactgtcacccaggtgagactgtgccctgcctcaggaagctgctttatgctaacagaattcataaccatttcattatatacaatcatcccctctccctccagctcctgaatgctactgtgatggatatctctgggcagccacccctttgctggttcctctgaggtctgacttccagccagggaggcctaggcaggctgaggtattcaccttcttctcctggaagatgccagatagacgcaagcctcaggtgtggaaacaaatgggaatgaccacagcgggtggaggaagcttgggtcctgctccccaaaaccttctctatctcccatcccccaggaactgagcaccccagggagctggtagaatggagatgtagccccacagaaccacgccccatgcccatagccttgaaaacagcctaatttattattccctttgcacatgaaacagaggcctagacagaatgtctgtgtttggagtccaccagaagccaaccttgagacaaggattcaagtatttaggaaataaacaggaaatactgtaagtggggtggatatgtgggagagggaagggaaggaagtcagcaaagagtgtattgataaccaggtttctacagtggacagctggagctcaatcccgtgggtgaacactaggggtcagtgtagaacatgaacctcaatcatccaacacaagggtgagggagctggggtatttatccatcaattccccttgactaccacagaggtgctgagctctgcccaaaactgacaggaaatggtcttttggtctttcaactaattggtctatatgtgtctggggctggttaatccaccaggtaccaaaagcacagcacatcagacctgcagccaatgagaacatttaggggaaagaaaacacacacgtggccaggtgcagtggctcacacctgtaatcccagcactttgagaggccaaggaagaaggatcgcttgaggtcaggagtttgagaccagcctgggcaacatagcaagatcctgtctctacaaaaaaaatttaaaagctagctgggtatggcagtgcatgcctataggcctagccactcaggaggctgaggcaagaggattgcttgaacccagaagttcaagtctgcagtgagctatgatcacaccaatgcacaccagcttgggtgacagagggagattatgtctctaaaaataataaggccaagcacggtggctcacacctgtaatcccagccacttggggggccaaagtgggaagatcacttgagcccagaagtttgagaacagtctaggcaacatgatgagaccctatctccacaaaaaaatagaaaaatcagcctgtggcatggtggcacatgcctgtagttccagttgcttgggaggctgaggcaggaacatcacttgagcctaggaggttgagggtgcagtgagttgtggtagtgccactgcactacagcctgagcaacagagcaagaaaaataaataaaataataataataaagtaaataaaaataacatgaaaataatttttaaaaaatttgagacagagtcttagtcacccaggctggagtgcagtggcacgatcttggctcactccaacctctaccctctgggttcaagcgattcccctgcctcagcctcccgagtagctgggattacaggtgcctgccaccatgcctagctaatttttatatttttagtagaaacggggtttcaccatcttggccaggctagtcttgaactcctgacctcgtgatccacccgcctcagcctcccaaagtgctgggattacaggcatgagccacagtgcccggccatgaaaataaatttttttaaaagaaaagaaaatgggccaggcacggtggctgacccctgtaatctcagctctttgggaggccaaggtggatggatcacaaggtcaggaaatcgagaccatcctggccaacatggtgaaaccccatctctactaaaaatataaaaattagctgcacgtggtggtgtgtgcctgtaatcccagctactcaggaggctgaggcagcagcatcgcttaaaccagggagtcacaggttgcagtaagccaagatcgtgccactgcactccagcctgggcaacaaagcaagactatgtctctataaaagaaaagaaaagaaaatgtacgcatacaggctctaaaatctgtacagcaactagcaaaatccacaggaataagcatacaaacatcattatgaaacttagaattcataaccatttcattacatacaatttgcagataatctgttctcacttatggaaatttctgattgctaagaaagaatcagagccaatggtgaattaaataggctacatgcaggcaaataaagacaacaggaaaagtacaaaaactcaaaaagatttacacaaaataataataataaatatttatgtggtatgtgggtgtcatatgggtggggctaagggttgctctcactcccatgtcagaccccagctcctctgagactctgaaataccccattgggaccttagtcctgcagcctctaccctcaacttgtaaacaggtattgtcttgacccctgacttctttccccattgtcaatagctgcctcaaagacatctgcgcagggatctcatagggaggagggtgcactccacccttttacagactgatgccccccaaacacacatatccaagaaaagtgaacagcacctaggagaactgtatatcaacagttgtataatgagtataccaatatatgcataatgagagtcccagaaggagagaagtgaaaggagcagaaagaatatttgatgaggctgggtatggtggttcatgcctataatcccagcactttgggaggccaaggtgggcagatcacttaaggtcagaaatttgagaccggcctggccaacatgacgaaaacccatctctactaaaaatacaaaaattagctgggcatggtgacaggcacctgtaaccccacctacttgagaggttgaggcaggagaatcacttgaacccagaaagcagaggttgcagtgagccaagaccatgcctctgcactccagcctgggcaacagagtgagactccatctcaaaaaataataataataatatttgatgaaataatggccaaaaaacttcccagaagcccagaattgatgaaagacatgaatctacatatccacaaagctcaacaaactccaagtacaataaacacagagaaccacacaaagacacattaaaaccaaacacacacagcctcctcgtccaggcctcttggacaccccctcctatacagacctccatcacctgacacctgatctcctacctgaatattcagcagtgaacaacatagacaagcatcacttgatcacttggtggagacccagtctggacgaggaggcagataaactagaacaaaccactgggactgttaaattcaagttgtggcaagtgttagaagaaaggaaactgagtaatgtgatactgactagacagaggtggtggacagaaagggtctccctagaaggtgccattggacctaaaggatgagagagaggtggcctcagaagaaccagggcttcccaggcagaaggaaccatgtgtgcaaaggacctgaggcagaaatagcttgatatgaaggagaaccagaaaggaggccatggtgagtgaatgggacagccaaagagatgaggctggaagtcttgtgagaccatgctgggaatctgaattttattctaggtgaggtgagcagtcataggaacactattcagcaggatggtgccacaatctgatttcagttttaagtccactgtgggtaatatatggagaatgaaatgtagggctaagacaggttatattttcccagatggccacaatatctcccaccctacatccacttgtacaatgtcaccttgacatgcctcccatgtagagaggtataatctgtgccccctttccttgaatctggtggcagaagtgacacagcatgacactcaaggctgggtcagaagagatgcaacttcttccttgttcacttttagagggctgggtggctgtctaagaagtctgactaccccaagaccaccatgctggaaggaaacccgaaccacacggagaggcctgtgtagctaccctggtccacagccccagcaacagctggcgtcagttgcaagacctctgagtgaagacacctccagatgactcaggaccctgccattttttagtcaccctctagcctaagtctcccctgtccaaactgaaccacagcatctgtgagcatcatgtaaaccaaaaggtatctcagataagtctcaataaatttagaaagcttattttgccaaggttatggacatgcctgtgacacagacttagaagctcctgacaacataaactagggtagtcagggccactaccttgattcaggtctgtaatcctagctacttggtaggccaaggcgggcagatcacttgagaccaggagggttttttgttttgttttgtttttttgttttgtttttttgagacggagtttcactcttgttgcccaggctggaatgcagtgacacaatattggctccctgcaacctccgcctcccgggttcaagagattctcctgcctcagcctcccgagtagctgggattataggcatgcaccaccacccccagctaattttgtgtttttagtagagaaggggtttccccatgttggtcaggctggtctcgaactcccaacctcaggtgatccgcccgccttggcctcccacagtgctgggattagaggcgtgagccaccgcacccagccgagcccaggagtttgagaccagtctgggcaacatgatgagactctatctctacaaaaagtagggaaattagccaggtatggtgacacatgcctatagtcccacttgctcgggaggctgaggcaggagcatcacttgagcccaagaggctgagactgcagtgagctgtggtggtaccactgcactccaccttggtctagttttatatattttagggagacatgagacagcaatcaatatatgtaagatgcacatgggtttggtctgggaaggcaggacaactcaaaagtagggagaaggcttccaggttataggtggataagagagaaacaattgcattctttcgagtttctgactagcctttctgaatatgcaatttacagagatagtcacttatgccttagtctggcttagtgaaacaaataggtaaggaagcgatcagatatgtgtttgtctcatgtgagcagagggacaattttgagttctgcctgtccttcatccataaggaatttccttgtaggcaaattgtgggggaggtatgtagctttttttttcttttcttttcttctttttttttagacggcatcttgctctgatgaccaggctagagtgcagtggtgcaattttgattcactgcaacctccacctcccgtgttcaagcaattttcctgcctcagcctcccaaatagctgggattaccagtgcccacccaccatgcctggccaattttttttctttttcatatttttagtagagatggagtttcaccatgttggccagcctggtttcgaactcctgacctcaagtgatccgtcgcctcagcctcccaaagtgctaggattacaggagtgagccaccgcgcccagctagcttttttaaccttgtagctatcttacttaggaatagaatgggaggcaggtttgtcctacacagttaccagtttgacttcttccttttggctcagtgatttggaggtctcaagatttattttcctttcacaatcacgacatggttgttttacatcattacgtttggggatggtttgtcaaacagcagtagtaattggaatttggaggtgagagaattgagtggggaaagagtggcatggggagaccaaggaagaagcttggggtggggtgggtagtggggacggtcattgaaacgaatgacactacggcttgcaccaggttgaagcagtacctggcaaggagagagaggatacgtggaggctgcgatttggagacagacccaagagaacttcctggatgccatcacccagagtcccatccagggagggtgggtgaggtggaagacaagggatcgggcctgcgccacgatcgtcacgtcccatcgaagctggagcggatccgggcacccggagcccccattccaacccctcccggccccaggcaactacatctcccagcatcgcccgctcgggccgcgggaaaggggaaaaaaaaaaaaagtttgggccaagcattcccggaatgtgcttcctgctggcgcggggcggggggcgggcggggaggcccgggcggggcggggagggcgcggggcggcgcggccggagcccggggcgcgcactcggctcggcccggcccgggccgcagcatggccgagccgctactcaggaaaaccttctcccgcctgcggggccgggagaaacttccccggaaaaagtcggacgccaaggagcgcggtaagcggagatcggtggggaacagggggcgccgagccccacccggcctgggagcggggtcccagggccccgaggacagacggtgggggggatcagggggagccccccgcaccccgctgcagactggggtgcctccagccaggggagggtaggggtcctggaaggaaggggctgggagggaggggggcgcggaccgttatgtgctgctggccggggatgccagcgctgcgggctccttgggaggcccgggagggggcctcgcccacgacaggaaatggggccgcgactgagggcctggagggtggaggggaggaggggctgggaggccgggacactggggcccagtcgggctgggcaaggggcatcgggagccctggaggcgcaggatgggagatgggaggcgtactcctgcaaaggaaagagaggggcggcccgtcaatcagagtagctgccccctccgcctcccacctactaacagtgacggcaactgcgcctgccttagccccaggaaactgtcccttttatacagatggggaaactgaggcacggagcaattgggtcatgtgcccagggccatcgacttaaacagctctttggactatgctacaaacagagaccctagagggtggacatcagaggtggccagaggaggagttcagcagggtagcaagtaaaaaccttagagaaacagctgcgtgggatagggggacccaggaaggaaggagttaaaggaggaaggccagaccattccatggacgtaccccttccccccaggccttcccaaagattcccaatgttcccagggaagggagaagggacagagatgcccaaacacaaacacacacaggaaacagcccaggacatgagacaggagaggagggagggaaggggaagtcccaaagcattgagcgtggggggtctggcctgggctgagggacaagggcccatcccaggatggcgacagagtttggaagacaggagggagggtaaaaggggcaggggactgggagtgactgtgctgcagggaatagaaaacccagctcctcactcctgagcacgtagtgcctgctgtgggctgtatacttttccaaaaggctcctggaagcctccctggacatggaaatcacatccccccatttcacaggaggatactgagcctcagagagggaagcgacttgcccaaggccacgcaggtgcaaagctccatgccacggttattgagagggtagaggaagtggagactggaacgcagtacctacgggccccaggaagcctgacttagaaccctgaggctgcagggatggagtccccttttgggatgccagggactgagtagggggtgctctaagctgataactgagatcgctagcctgtggctgcctattccaaacaaaacagcaggatccaaggaaccatgacttatcaggggccggccagggccgtacacagcatcccacccactgatcaattgcacagggctgctctgcaggcagtgaggggctgggtgggtctcactccccttgctctctgccaggccacccagcccagcgcccagagcccagccctccagagccagagccccaggctcccgaagggtcccaggccggagcagaggggccctccagccccgaggcatcaaggagccctgcacggggagcctacctgcaaagcctggagcccagtagccgccgatgggtgctgggtggggccaagccagctgaggacacctctttagggcctggggtacctggcactggggagcccgccggcgagatctggtacaaccccatccctgaggaagaccccagacctccagcacctgagcccccggggccacagcctggctcagctgagtcagagggcctggccccccaaggtaagaacaagcttcccatccccttccccaaggtgagcaccagctccacatcccttcccttcagggtagcaccagcctcacactccctcctcccagaggagcaccaacctcacactccttcccttcaggggagcaccagcctcacatccccaccccgtcagatgctcccagaggagcatcagcctcacaccctcctccccgccaggggaacaccagcctcacactccttcccttcaggggagcaccagcctcacccccctcccctaagcccaggttcctggaccctgaagtctgctctccacacaggtgcagcccccgccagccccccaaccaaagcctcccgcaccaagtccccgggccccgccaggcgcctctccataaagatgaagaagctgccggaactgcggcgccgcctgagcctgcgaggcccccgggctggcagggagcgcgagagggctgcccctgcgggctccgtcatcagccgctaccacctggacagcagcgtggggggccccgggccggcagcagggcctgggggcacccggagcccgagggccggttacctcagcgacggggactcaccggagcgcccagctgggcccccatcacccacctccttccggccctacgaggtgggtcccgcagcccgggcacccccggccgcactctggggccgcctcagcctgcacctgtacggtctcggggggctgcggccagcgccgggggccacccccagggacctctgctgcctactgcaagtggatggggaggccagggcccgaacagggccactgcgaggggggccggacttcctgcggctggaccacaccttccacctggagctggaggccgccaggctcctgcgcgccctggtgcttgcgtgggaccctggcgtgagaaggcaccggccctgtgcccagggcaccgtgctgctgcccacggtcttccgaggtaggacatgcggctgcaggggaggaggggcagggacccccaaaccccaccgccaccccccgcagagtgcctagggggctgggctccgggcggaaggtgtggcctggagcagcgaggccagggtacatgaagcttcagagcacacccggctcaggcccccttgtgtcctcagggtgccaggcccaacagctggccgtgcgcctggagcctcaggggctgctgtatgccaagctgaccctgtcggagcagcaggaagcccctgccacagctgagccccgcgtctttgggctgcccctgccactgctggtggagcgggagcggccccccggccaggtgcccctcatcatccagaagtgcgttgggcagatcgagcgccgagggctgcgggtgagcacccaccccaccccaaccctctggcccccagacctcagaccactcttcaggacaccctatgtacagatgccagacccctacccccaggcctgagccactcctagctccaatcccaacctagacaagggcagaaggcgcccccttgactgtagcaccctgggcagaacccatgggtcatccattgatttaaaaacaggatccaagccctcctggggctcagagtctgatgggggaaaagatacgactctagtcattcacaaatgtaaaactataactgggactggagttggggtggggtgtacctagggtctgggagagcttaaaacaaaacctggggtagtcatggaaagcctcctcaaagaagtgtcagtttcctaagtcaaaggagatggcagccaagacaagtagtccaagcagagggtttacaaggccaggttgtcaaggtagttccaacctcccagcccacaatgcccattgctgcctggcccagaattccagtgctcaccccactgggccctgattagtctgtggccccggcaagaagacattcactctctcttcccacccccaggtagtgggactgtaccgtctttgtggctcagcggcagtgaagaaagagcttcgggatgcctttgagcgggacagtgcagcggtctgcctatctgaggacctgtaccccgatatcaatgtcatcactggtcagcatggccccctctcccctgcctgctcacccccattcaatgcctcacttcaaggccttggggctcctctgggacctcagtcctcctatctgaccttgctttcacccacctcctcttcccccttagctgtgccctccttagccttagaagccagtggtgccctgaccagaggggaccctgtgttcacaggcatcctcaaggattatcttcgagagttgcccaccccactcatcacccagcccctgtataaggtggtactggaggccatggcccgggaccccccaaacagagttccccccaccactgagggcacccgagggctcctcagctgcctgccagatgtggaaagggtgagttgggcctggtgggagtgatgggacttgagagtgggctgataccaatagaatgtttcacccatgcctgggcctgagatgggcatgagctggcagcatcatcatatccccaagaaataggtgctattagcatcccacttcatagatttggaaactgaggcccaaagcaggtgacagttgcccaaggtcacacagccaggatgtgtcaaaaatgcaggctgaacgctgatctttcaacctacaagggaggttcctggctgagggaacctagacaagtcccatccctctctgtgcttcaatatcttcatctgtaaaatgagattcatggcagctctgcttttccaatgcttagttgcctttggcttcagtcttccctccaacaaaataggctcataatactaacatctaatgattaatagtcttaacccgaccacatcccagctatgagactgtgaacctgcttccctactctagccaccttagtctcttgcaggtaggtgccacaggggcctgactttgtctgacttacatcctctcaaccctctcccaggccacgctgacgcttctcctggaccacctgcgcctcgtctcctccttccatgcctacaaccgcatgaccccacagaacttggccgtgtgcttcgggcctgtgctgctgccggcacgccaggcgcccacaaggcctcgtgcccgcagctccggcccaggccttgccagtgcagtggacttcaagcaccacatcgaggtgctgcactacctgctgcagtcttggccaggtgagttcatgcccagggcctgcaccaccaatctgagccaggctgctacagtgatgccaccttaagggaccaatcagtgtcttaggcttgaagctacgccccctcatggagtaaactggtacctggttgcctcagcaaccagttcagatccaaccaatctgtctgttttgtctttttttattttcatttttttgtaaagacagggtttctctatattgcccaagctggtctcaaacgcatgatctcaagccatccttccgcctcagcctcccaaagtactgggattataaaccaaatcaccttgccccacagagctgattcatctttttatttttattttttattttttttgagatggagtcttgctctctagcccaggctggggtgtggtggcatgatctcagctcactgcaacctctgcctcccaggttcaagggattctcccacctcagcctcccgagtagctgggattataggcacgcaccaccagtcctggctaatttttatattttaagtagagcagggtttcactgtgttggccaggctggtcttgaactcctgacctcaagtgatccacccatttcaggcctctcaaagtgctgggattacaggcatgcactaccaatcctagctaatttttgtatttttagtggagatggggcttcacggtgttggccaggctggtcttgaactcctgacctcaagtgatccgcctgcctcaggcctcccaaagtgctgggattacaggcatgatccaggcatgatccacagacctgcccctacccatctttgatgcagtcagaggccctgcctcttgacatgccaatcagaggcctagttgcgtaagcaaccagtcctagctctgccagtgaaaacctgaaagggtcgaaggccgctttccacaggccaatcaggagcctagttccctaagcagccaatcagaggtcggctgtcgcctctttctatgacctaccctgtctcccttcagatccccgcctgccccgacaatctccagatgtcgcgccttacttgcgacccaaacgacagccacctctgcacctgccgctggcagaccccgaagtggtgactcggccccgcggtcgaggaggccccgaaagccccccgagcaaccgctacgccggcgactggagcgtttgcgggcgggacttcctgccctgtgggcgggatttcctgtccgggccagactacgaccacgtgacgggcagtgacagcgaggacgaggacgaggaggtcggcgagccgagggtcaccggtgacttcgaagacgacttcgatgcgcccttcaacccgcacctgaatctcaaagacttcgacgccctcatcctggatctggagagagagctctccaagcaaatcaacgtgtgcctctgagccagatgacggggtgggaccccggttagtaaggaccgggcgcccagtggctaaggcggtgccctggtgaccaaggagagccagacctgttgctcaggccgagctcctggttgccagcgagttaccacgggaccagtcgcgtgtatggctgagactcattcccagtttccagggcccggtatttggacactagttgccaagtctggggcctggggattttagggaccagcggttgtgaccatctttcctgagcaccaagggcttccccttttgttgccaaaaaggtagttctcgcgcttgctaggctggcctctcttgcctccccttggccggggcaacaccagttactgtgagcatcaccctggtgtggtgagtcacctctagtcggccctcttgctgctgccaaccaaatcagtattagctttgagcactgcactgtttctccctcccttggacgacacaaagactagcatgaggcactgtttgtggggggcagcccctatcctgggttccagcatggacacaggggtagcctggggcttatagagaaacagctggtttcccctacccttttccggggaagtccccacgattggcctctagtcagcaaatggagataacagagtctggcctttccaatccccatctccttgccccccccttgcccccccccccgaaaaaaattgagcacttaaacccctcccttttggagggggccccctgaagcgtcaggctgggggcagtctggtacggaacatatttattgcctccatgcatgtgtgtgtgtgtctgtgaggactggtgtgcgtggacacgtctgaagcaggcgtgtggggctctttcagggaccacagaggagggagcagtttgcagtgcccagccaccctgaaatccccaataatggtgcctcagtgggccccagagttccagtgggagagtacggttccctcctgtctccctcttcttttccgcacctccatctttgtggataataaataaatatgcacaggttctgagactgagtacttgggcctacatgggccagaggtggtttattcagtctccataagagaggggacaaacggcacagttgggtccgtgaagaggagggtccaagagctcacaagagagcctctctgagatttgacccctccatcccctcctcagggaggttgtggagtcactgggcctcatgggataggcccagggcaagcaatgatgagactccaaaccagctggacacagtccaggggcaggaaggcagccaagcgtcctgacccacaaggccctatacagcaatggagccatcgcggaagtccgtcctcccaatgaggatgttgaccacaaccgggtggccgtctcggcactgctgctgggcatcgtgcagcaccttgaccacctgatcctcgttctcccgtgagagcagcaagccccgggcccccagacccatggctgccttgtgataatctaaaagaagagattaagtcggatagtggcaaggactcagcccaccgcacatgcagccagcccaggagaggaacacaagcccagctgggactgaaacagcctcctgtcctcccaacctcgctgaggccccctcaccagtgtaggccaggccacaggccacgttgctgcccagagagggcacctgctcccgagaaatctgtgtccagccagcatcattccctaccaaggccatcactgggatctacaggaagatgatgaaggcaggccgcagccttcagccccatggcttggccagccagaggacagagacagggatagggcctctgccagagaggaggctccctccccacctcagcccacccctggtgacatctcccagaaccccaggccctaagcttccctcaggccagcccagtcaccttgtgtctgacgaatgtatcaaattcgatgaggctgtagccaaaagctccgtccccaaacaggcaccagacctagtcgggaggggacccaggatggttagggtggatcaggacctagagagcagcaagtctcccaactccagtgcctcacctcagcatctggccggcacagcttggccccaagtgcaaatcctgcaccaactcccagagtcccaaaggcccctaagaggaccaagagcaggtgggtgtgaaggcgtcctgatggatggtgcccactgccccaggcgggggcccttccttaccaggatcgagccagcgcagggggccgcggggctgtaccagatgggcagcagtgcccacgaagtccccgccatccaccaccagaattgagttgtcaggtagcgtttcctccaccagctgcagcacctgcactgggttcaggtgctgggccacaggcatcgctgccttctccctgcgacaggacagcgaaggtcaccagggttggcagcagggtctgccgggaacccccttcccacatccactccacccaggccccaccgaaaggtctgctccttctgccggtcggcttcccgcagctcctccacccagtctggggcccaggtctggccctgaaggccctccactaacttcagcacgaaggaacccacatctcctggggaaggaagaggacacagctgtggggagctggcttcctcctgttcttccagcatcagaggcctcaaaacagcaggaagccagcagcagcatccgagcaggcagacgggaagcaggccaggggtgctcctagaaaaaaaacaggtgaaacaccccagaacctgccagaaccaggggagggcagcccaggtgaaaagggaagacaaggcccaagaaacaagggttaaggagcacaaggcaggtgacaaacccaagctggcctcgtcccctccctccacctccttctgcctgggaaacactcaatgaaaagagctacatccaccaagcacatctctcaaatccaggcacgtggaagcgcacagcgaacgttactgaagtgaactaacaaacagccccgtgatgtatctttcaccaccccatttttcaaatgatcaaatggaggctctgagaaggtgaggctctgccgctgttcatctccagttcaggcctcctcgcttctgtcctggccattttgagcagcccccctggcctccacccagcccccttccggcctgccgtccatggctgctgagtggaccttcccaacacagatgcaacggtgctacttctctgcttaatacaagagtgtcctgtcgcctaggctgcaggggagtcaacatcctcagaatgatgaaccaagttcaagtccaaggggactaaaataaggggaggggagagatacggcaggaagacaggctaaggggccaacgagtgtgctctctgtcctgagggcagtgggcagtgtgggagggaacgtgatcacatgcacgttttcaagcctccctctgtgtccaccccaccatttgttcctacagaagcatctatcaggccgggcgcagtagctctggtctgtaatcccagcacttttgagaggccgaggcaggaggatcacttgaggccaggagttccacgccaacctgggcaacacagtgagatgctgattccacaaaaaaaaattaacaaattagcctggcatggtggtgcatacttgtagtcccagctactcaggaggctgaggtgggaggattgcttttgagcctgggagtttgagggtgcagtgagctgtgattgcactactgcattccagcctgggtgacagagcgagacctcgtctctaaaaaataaaaataaaaaaaatttaaagaaagaagcattcatcagtttgagagccaactatttgtctctggttgactggctacccctagggcaaggtctgggcctcaatcactgtaccaggctcaagccagctgcagcagaaaccaggaggagagggactgggaggagcacatatgtgtacggggggattaaggggctcaccctgcacagcctcctggggcttccagaagatgtctgagttgagcaacatctcttcccgattacgattgacgatgatgatcttgctgctgtggctgaggacacggccataggataggcggaagtcacacacagttcctggtgtgggggacaggaatgcagtaggcagaggccccatgtcgtctaccttacttgatccactgtggtggactggatgcaaatgagtccctgttcctcaccgagtctccctgcacctgtgccacctacagtgaccttgcagctccccacaccccctgaatcgggactggcctcatgacatgctttggccaacaggatagggcagaggcaggttatattttcccagatggccataatatctcccaccctacatccatttgtacaaggtcaccttgacatgcctcccatggagagaggtgcagcctaggtcccctttccttgaaagtgacacaccatgacacccaacaaggaagatatgcagtttcttccttgttcacttttagaggcctgggtggggccaaggaatgtgctctctgtctaagaagtctgactaccctgaggccatcatgctgggaggaaaccggagccacacatagagacctgtgtagttgccctagtccacagcccctccaacagctggcgtcaattgcaagacctctgagtgaagacacctccagatgattcaggacccccaccccccattcctgcagactctacttcaagaagccacacagcctccactcactctcttgaataaccgcactctcctagccccatagttttctcatccttcaccaagtcggccagcccaggctagcctactggaggatgagaaacaagggggccatggagacaggggtgaagaactctatgaccccagctgaggccatcccagacgagctgcagggccagccaatccccatacaggtgagcaagcccagcctggatcagcacagctgccttcctgcctaacccaagtgcagactcatgaatgagcccagccaaaaccacagctaccacctaccttataggtggatcttgagaaatcagaaatgcatttttagccattgagtttggggatggttgttacagggcagtagctatctgatacacctattatgcgtctggttgggttcaaagcgctttatgtgaaaatgtgtatcaagtacaataggtgcccactagaccttcctcctccttcgtgtgaagctgggtaacagggtgagggggttcctgggggaaggagggaaaggaagaggctcaggcccacctgctaggacaatgacatccgccttcttcagggccgcactgcggttctcccggatgtggagggggtggttgcggcctaacagcccccgtgccatccctccaaggaagcagggaacacccaaggtctccacggcagccctgggagtccaggcagagcagaggtcagtgtggccggggcctcccgcctccccaagagcacccgaggactggggactgggaacgtgaaaacaagggcagggctggcgcttctcaccgaagcttgtcggcagacgttggggtgagcagggcctgactccccagcaccatcagaggcctcttggcccggctcaggatctccacacagcgctgaacctggagcgagaggtggggatcaaagggctgtctttttatttatttatttttttgagacacagtttcactctgttgcccaggatagagtgtaatggcatgatctcagctcactgcagcctccacctcccaggttcaaacgattctcccgcctcagcctccagagtagctgggattacaggcgcgtgccaccatgcctggctaacttttgtattttcagtagagacagggtttcaccatgttggccaggctagtcttgaactcctggcctcaagtgatccgcctgcctcggcctccctaagtgttgggattgctgctgtgagccaccgcgtccagccaaagggccgcccttgagtcgccatgagcacccaagattaaggccccagtactgactcagggagagggtcagggggccctctcccctcagggagagggtagggtcctcagacacaaaagagaggcaattcacctgctgcggggaagcctgggggatgtccaggggcagcggtccctcgggctgaggctcccaggctcctgcaaagaggttggccaggtaattctctaaatacctgcaaaagggagggggaagaaaccaagttgccagaattaactaactacaaggattccaggatctgagcaaggaaaggggccgggagaaaagccaggagcaaagtggcatggggacagggtggatgagtgacacctcagggacagacgaaccctagtggccaggtcttcaactgcctgtttgccctcggtagcctctggggtccaccccaactccacgtagccccccagaagcaaggaacgcaggctcagcatgccaggattaagcctgtgggtccaacagatgtgagctcaagtcctggctctgtcacttcctagctgtgcaacttagggcaagtgacttcacccttctgagcttccacctctgtcaatgtaaatatgaacctccctccccaggttcaaggatctgtccacttaggacatgaggcgctttgcatgggagttctgaacactgtcctctcctgcttcaaacagggtcttctcggtctccttgctcactgggccccagggccccaactttcctgaaggacctgtgcagggccctggagacacaaagatagatcctgcccagccctcccctcagggggcgctctatccagcgaaagacagacacatgggcattggcaggaaacagtcggagctcagagtcagaagcctctgctttcaccgttaaggacaggccaagacagcacagaagcagcccaggatggaaccgtgggaagccccgcaagtaaagaaaaggcaagggaggctgaggcaggaggattgctcgaggccaggagttcaaggctgtggtgagctatgatc

SEQ ID NO: 172 - DNA, 297 bp, Homo sapiens
cggccgcgccgggagagagcggcatacagagcaggggcggcggcgggcgcggctgcctctcgctcgctagctcgcgcgctcccaaccgcccggaaccgaccgcgcggcggcgcccctcccccccacaacacgcccacgtgaccggccggcgtcagcaccgcccctcttcgcgccgtggcccgccgcctccgccccccgaaatacgcggggggtgcgtcggggcgacgttttactttaaaggcaaaaaaaaggggacgccgcgatgcccccagaaaagtcacgactgacctcgtgccg

SEQ ID NO: 173 - DNA, 499 bp, Homo sapiens
  misc_feature (443)..(443): n is a, c, g, or t
gcggccgcagcacagcaggtcgcagccgctgaggtccggggcgctgctattgcaggcgcgaccgcgcgtgccgggggagccggtgcgtcggttgggggcgcagaagtcgggcgaatcggcggcgtagaggaggtccgctcggcccggcggcttgagcgtgcggacggcgggcagcagggccttgccgtcgttggtgcccatgacgcgtgaggcgccgtggaagcgctccagcagccgcgcgcccacctcgcgaaatggaggcagcttctgccagcaggtgcgcagcgcgcatgatcccgacagcccgtggcatttgcactcggtgcgcgtgtggctccgcacggcctgcgggaggcagaggggcggacgcatgtggacaggtagggggtgcagggaagggcccagcggatggacagaaaataagattgggaatgggaggtganaggaagagaggaaaatgcagacaaaaggagaccgcaagttcagggggaggaaatca

SEQ ID NO: 174 - DNA, 1031 bp, Homo sapiens
agccgtaggtgccactgtcactcttgttgaggaaagggaagatcagggcactctcctgggtcatcttcaggggtggcacactgccctccttctcccataggtactgctgggggctgtcgaggcagacaaatcagaagagctcaggagagcataggccagggagctaaaagaaaaaaaaaaataactgggagcagggatgtcaaggactgtttgatgaggctggagaaattatcggggccagagacactggagctgctatacgccaggtggcctcttggggttcgttctggggaagctgtagatctccagacttgtatcttactttaacttggcctttgtgggaaactcagggactgagttagggagtggccccttcccatttgtgctgctttgcagaagaactaattgcaggcggacattattggacagtcagggaaatgagaggctcaggtcagacaatacagaggagataggaaggagctgttatgtgaagaaggcaatctgagaatgtggagagtaaggaggagaccaggaaatggatcttcttacactggattgccgcgaccctcacagtgtagcaacagcttctggccctcacgaggatggggagggtctggcctaatcatcgcagttggtgtgtctgtggagaaggaaatggtatcaatgaatacctccccacacggcttaggagattccctcacttagttgcacactacagcttctacctctaaatgtttccgcagctcaagaagtgcaacaaagaccttccttctcctacttctcatgaacaaggaccattattgctattgaatatgtgagcaacttctcttgcaaccttgtgtgataggattctggaaggtctgtccttggtgggccctaagagatgtcttaacagaaagctgagaagggaaatgagtggtttacctgtgcctagcaaacctcctagcacataggaaagacctaatacatattttttacagaacaaataaagttgaacttgtcacatattgagctcacaaaaaaaaaaaaaa

SEQ ID NO: 175 - DNA, 3389 bp, Homo sapiens
aggcccggcgctcctcaagatggctgccgacagtgagcccgaatccgaggtatttgagatcacggacttcaccactgcctcggaatgggaaaggtttatttccaaagttgaagaagtcttgaatgactggaaactgattggaaactctttgggaaagccactcgaaaagggtatatttacttctggcacatgggaagagaaatcagatgaaatttcctttgctgacttcaagttctcagtcactcatcattatcttgtacaagagtccactgataaagaaggaaaggatgagttattagaggatgttgttccacaatctatgcaagatttgctgggtatgaataatgactttcctccaagagcacattgcctggtaagatggtatgggctacgtgagttcgtggtgattgcccctgctgcacacagtgacgctgttctcagcgaatctaagtgcaaccttcttctgagttctgtttctattgccttgggaaacactggctggtgccactctttgtgcaaattcaccacaaatggcgaagaatgtatgtaggagaatgtcaaggtcctggtgtacgaactgatttcgaaatggttcatcttagaaaagtgccaaatcagtacactcacttatcaggtctgctggatatcttcaaatcaaagattggatgtcctttaactccattgcctccagttagtattgctattcgatttacctatgtacttcaagattggcagcagtatttttggcctcagcaacctccagacatagatgcccttgtaggaggagaagttggaggcttggagtttggcaagttaccatttggtgcctgcgaagatcctattagtgaactccatttagctactacatggcctcatctgaccgaagggatcattgtggataatgatgtttattctgatttggatcctattcaagctccacattggtctgttagagttcgaaaagctgagaatcctcagtgtttgctaggtgattttgtcactgaattttttaaaatttgccgtcgaaaggagtcaactgatgagattcttggacgatctgcatttgaggaagaaggcaaagaaactgctgatataactcatgctttgtcaaaattgacagagccggcatcagttccaattcataaattatcagtttcaaatatggtacacactgcaaagaagaaaatccgaaaacacagaggtgtagaggagtcaccgctaaataatgatgttcttaatactattctcctgttcttattccctgatgctgtttctgagaaaccattagatggaactacttcaacagataataataatcctccatcagagagtgaagactataatctctacaatcagttcaagtctgcaccatctgacagtttaacatacaaactggctttgtgtctctgtatgatcaatttttaccatggagggttgaaaggagtggcacacctctggcaggaatttgttcttgaaatgcgtttccgatgggaaaacaactttctgattccaggattagcaagtggacccccagatctgaggtgttgtttactgcatcagaaactacagatgttaaattgttgtattgaaagaaagaaggcacgtgatgaggggaaaaagacaagtgcttcagatgtcactaatatatatccaggggatgctggaaaagcaggagaccagttggtgccagataatctaaaagaaacagataaggaaaagggagaggtaggaaaatcttgggattcctggagtgacagcgaaggagaattttttgaatgcctaagtgatactgaagaacttaaaggaagtggacaagagagtggcaagaaaggaggacctaaggagatggcaaatttaaggccggaaggacggctctatcagcatgggaaacttacactgctgcataatggagaacctctctacattccagtaacccaggaaccagcacctatgacagaagatctgctagaagagcagtctgaagttttagctaaattaggtacatcggcagagggggctcaccttcgagcacgcatgcagagtgcctgtctgctctcagatatggagtcttttaaggcagctaatccaggttgctccctggaagattttgtgaggtggtattcaccccgggattatattgaagaggaggtgattgatgaaaagggcaatgtggtgctgaaaggagaactgagtgcccggatgaagattccaagcaatatgtgggtagaagcctgggaaacagctaagccaattcctgctaggaggcaaaggagactcttcgatgatacacgggaagcagaaaaggtgctgcactatctggcaatccagaaacctgcagaccttgctcggcacctgttaccttgtgtgattcatgcagctgtactcaaggtaaaggaagaagaaagtctcgaaaacatttcttcagttaagaagatcataaagcagataatatcccattccagtaaagttttgcacttccccaatccagaagacaagaaattggaagaaatcattcaccagattactaatgtggaagctctcattgccagagctcggtcactaaaagccaagtttggaactgagaaatgtgaacaggaggaggaaaaggaagatcttgaaaggtttgtgagttgcctgctggagcagcctgaagtgttagtcaccggtgcaggaagaggacatgctggcaggatcattcacaagctgtttgtgaatgcccagagggctgcagctatgactccaccagaggaggaattgaagagaatgggctccccagaggaaagaaggcagaactccgtgtcagacttcccaccccctgctggccgggaattcattttgcgcaccactgtgccgcgccctgctccctactccaaagctctgcctcagcggatgtacagtgttctcaccaaagaggactttagacttgcaggtgccttttcatcagatacttccttcttctgattcttctagcattactcgttggtggcttcagagacagtgctgcctcctcctgagggagggaaggtaccagggagaacctgggaggtcctggagagggccctgtccagttgggtgatcaggaatcaaaccagcatcggaaagacttcccagcaccaagcttgagctgtgtcgtttcgtggagggggcagcgaggatgggcttgagctgttgagagatttctgccctagagatggcctttgtatatgggggggtggtggggggacacaaacacatcagacactccgtcctcacactggcaggacgatgttcatcgcattctcttctgtgaccagcctctaggctagcggctgcattcgtggtctgtgcaaacacttcgtggttctatatatcagcagcaagtgtgcaaaataaaggacctgttaactcag

SEQ ID NO: 176 - DNA, 240 bp, Homo sapiens
gcctactactactatacggctgcgagaagacgacagaagggtggtcagtaggagagcacgttcagagggaagagccatctcaacagaatcgcaccaaactatactttcaggatgaatttcttctttctgccatcttttggaataaatattttcctcctttctatggaaaaaaaaaaaaaaaaaaaaaaaaaaaaaaaaaaacaaaaaaaaaaaaaaaaaaaaaaaaaaaagtcgtatcga

SEQ ID NO: 177 - DNA, 79528 bp, Homo sapiens
ctccaggagctcagctccctgaaaggaaaatgatgccaagccaggcgcagtggctcacacctttaatcttagcaatttgggaggctgaggcaggtggatcacttgaggtcagaagttcaagaccagcctggccaatatggtgaaaccccatctctactaaaaatacaaaacttaggccgggcacagtggctcacacctgtaatcccagcactttgggaggccgacgtgggcggatcacctgaggtcgggagttcaagaccagcctgaccaacatggtgaaaccccatctctactaaaaatacaaaaattagccaggcgtggtggtgcatgcctgtaatcccagctacttgggaggctgaggcaggagaatcgcttgaacctgggaggcagaggttgcagtgagccgcgatcgagattgcgccattgcactccagcctggatgacagatccagactctatctcaaaaaaaaaaaaaaaaaaaaaaaaagaagaggaaagaaagaaaaaggaaatgacgccagagtgggcaggtccaacaggactttcagcccaaaccacacatggcacctgtgtccctcaccaatgcctggcctctggcactgagcttgggtcacctgtccacatctacttcccatggagtgagttatttcctttgaggcatgagtgtcctctctgccagctggacaggactgtcctgatgggtcagatagcagctaatcctatcaggagagaggaactggggcccaatctcatttctcttggcggtccccagactagccacaaatttgcccacctcctgccaggttaagagaaaggcagttttgagagttgattaagagcatggagtttcctgtaatcccagaactttgggaggccaagctgggaggaccacttgaggccaggagttcaagaccagcctgggcaatatagtgaggccccatctctacagaaattttaaaaattagctgaacgtggtgatgcgcacctgtggtcccagctacttgggaggctgaagcaggaggatcacttgagcccaggagttcaaggttgcagtgagccatgatttgtgtttcagccttagtgacagagtgacaccctgtgtcacaaacaaataaacaacaacaacaacaaaaggccaggcttggtggttcacacttgtaatctcagcactttgggagatagaggcgggtggatcacctgaggtgaggagttcggaaccagcctggccaatatggtgaaaccccgtctctactaaaaatacaaaaattagctgggcgtggtggtgggtgcctgtaatcccagctacttgggaggctgagacaggaggatcacttgaacgtgggaagtggaggttgcagtgggctgagactgcaccattgtactccagcctgggcaacaagagcgaaactccgtctccaaaaaaaaaaaaacaaaacaaaaaaaagagcatggaattggactgctttaggtaagttccttccccacctgtcaaatgaagtgataacaacagcaaaagaccgaatgttaatacctacggatagatcacttagcacagtgtgggcagatagtaactgctcaataaatgggaactactgttacatacctgtatgtagttctctaatatccctattttataaaaatgaggtccccccatatttttcttagcttccttttgtcaattaatatatcatagacatttttccaggtctgcacatgtagcctcctctatgtgagagccgcatggccttccaaaggacgccgtccatgcaagaggctaaactatgtctgtgggttcaaaaccctcagtctgtgccatggtgctttaaaacttggaaatggctcatacctgtaatcccaacactttgggaggccaaggtgggaggatcgcttgagcccaagagtttgagacaaacctgggcaacatgtgaaacactgtctctacagaaaataccaaaattagtatttttggtgtggtggcatgtgcctgtagtcccagctatttgggaggctgaggtaagaggatcgattgagccctggagttcaaagctgcaatagccataattgcactccagcctgggctacagagaagacctgtcttaagaaacacaaacaggctgggcgcggtggctcacgcctgtaatcccagcactttgggaggcccaggcgaggggatcacgaggtcagtagatcgagaccatcttgcactccagcctgggagacagcgagactccatctcagaaaaaaaaaaaaaaagaaaaagaaacacaaacaaaaacaaacttggaaattagttaaggtttagttcagttagatcagttaaagtttaactgttaaactgtcacctgcatttttatttctttgtctggaaatgtgtgtttgtctttctgttcatttgacttctaacccacatgggatgggttttcctaacttgggagaagcaggtgagaggtcagcctccacagggtgaggctgtcaaggaggaggggggaaccaggacagccagtggccagggcaggacaaaagaaggccggccatctttgttttgttttgttttgttttgttttgttttgttttgttttgttacgaggcagagtcttgctgtgcctcacccaggctggagtgcaataatgagatcacagctcattgcagcctccatctcccgggttcaagtgattctcctatctcagtttcccgagtagctggggctacaggcgtgcgtgtgccatcacacctggctaattttgtatttttaaaaattattttattttattttattttattttattttgaaacggagtctcgctctgtcacccagtctggagttcagtggcacgatctcggctcagtgcaagctccgcctcccgggttcatgccattctcctgcctcagcctcctgagtagctgggactataaccgcctgccacgacgcccagctaattgttttgtatttttagtagagacggggtttcaccttgttagccaggatggtctcgatctactgacctcgtgatccacccgtcttagcctcccaaagtgctgggattacaggcgtgagccaccgcgcccggcctattttgtatatttttagtagagatggggtttcaccatgtctgctgggctggtctcgaactcctgacctcaggtgatcgtctaccttggtctcccaaagtgctgggattacaggcgtgagccactgtgcccgcctttttttttttcttctttttgttgttgttggttttatttatttatttggacagagtctcactctgttgtctgggctggagtgcagtggtgcaatctcagctcactgtaacctctgcctcccaggttcaaacgattctcctgcctcagcttccagggtagctgggattacaggcgcccaccaccacacccagcttatttttgtgtttttggtagagacagggtttcaccatattgaccaagctggtctcaaactcctgatctcaagtgatctgcccacctcggcctcccaaagtgctgggattacaggcgtgagccaccgtgccgggccatgcgccatctttgtttctgttccagatgcctgggagtccttccatctcttccctcaccccccacagccaaccctttagcaaggacttttcctcaatatttctcatatctgcctcttccttccacccccacggccaccactttaattcagaacttggatcactgagatggcccctaatggtttcactgccttcttctgcccttccctagtccattgtccatatggcaacccggggcaggtgcagtttggaaaggaggtggcactacctggtaatgctgaagctgtgtatacttctagctccttcccctttgcaccagggcacttgcagtaggaaagtcacagcgacattgtctgcaaagcaagaaactggaaatgtccaggcacagcagctcacgcctataatcgcagcactctgggaggccaaggtgggtggatcacttgagcccaggagtttgagaccagcctgggcaacatagtgagacgcccatctctataaaaaaagaagaaagtggaaacaactcaaatctccatcaacaacagtggattcttttcctgttgctgctctaaccagttaccccaaactcagcggctgaaacacacacatttattatcttacagagctggaggtcaggagtccaaaatgattttactgaactaaaatcaacaagtcagcaggtatgcatttcttctgcaggctctaagggagaatctggtttttgcctttttttctggctttcagaagctgcctgctttcctgggttcatgggtccttccatcctaacgtcagcagtagtgggcaggcctttctcaggacactgtctctgattctgactcttctgcctccctctctcccatttaaggatccttggccgggcacggtggctcacgcctgtaatcccagcagtttgggaggctgaggcaggcagatcacctgaggtcaggagttcgagaccagcctgaccaacatggagaaaccccgtctcttctaaaaatataaaattagtcagacgtggtggcgcatgcctgtaatcccagctactcgggaggctgaggcaggggaatagcttgaacccaggagatggaggttgcagtgagctgaaattgtgccattgcactccagcctgggcaacaagagcaaaactccgtctcaaaaaaaaaaaaaaaattccttgtgattccactgggcccaccaggataatccaggatcatctcccatctccaggccgggtgattagcaacctttgttctcccttgccgttaaaggaacatttttgaaagtttcagagattaggatgtggtcatatttacaggccatttttctgcctccccacacagttacccacacagttacccatcgcataatagggctggggctgggggatgtgagcagaatccctccatacccaacatataaccacgcgaggcccccagctgagggcccggtgtgttgggcagagagctgaaggcaggggaacactgtccagtcgctgcacagcagtgtgaggaaaggaagaggagtcgtctgtaaaaacccattgactgtgctcatttcacactgcgtgcctctatcaaaacatctctagccaggcgcggtggctcatgcctgtaatcccagcattttgcaagggtgaggcaagcagaccacctgaggtcaggagttcgagaccagtctggccaacatggcaaaaccccgtctctactaaaaatcctaaaattagccagggcctggtggcgcgtgcctgtaatcccagctgctcaggaggctgaggcaggagaatcgcttgacccgggaggcagaggttgcagtgagccgagatcatgccactgccctctagcctgggcaacagagcaagactccatctcaaaaacaaaacaaaacaaaacaaaatctcatgtatcccatacatatatacatctattatatacccacaaaaattaaaattaaaaaaaagaaaaaaacaaaaaatccccattgactgtactctctgttatattcctggggccctcaaatgttgattacttttcagttttgagaatctaagtgacacctagcctggacaggaggaggggagagcccctgtttctggcaggtttctaagaggaatcacaggactgggctgagaggaggggacccagcacccaggctagagcagccacccctccatccctgagtgaggggccatctgctgccccccgcctctccctcgcccccacccccgcctctatctcaagccttgctcctttcccctcgggtgcctccacctgccgtttgccccgtcctcacagagtgtgaatcttgactcaaagtgtggacgtcaaagccccttggaagtgggaaaggcccaggcgggtgcagattgtttatttgcttgctgggtgctgggtgtgaaaggaacagacacgtgcttgcctcgtggggctcagtctctagtggggaagatgggcactgctgtcattgtaaagtgtgattttgtgaaaagtgctaagaaggaaaggacaggggctatgagagggggttgtggagtcctaattaggaaggaggagttgaactggtgagattgagggaaagcaaaaagcgaaagcaggtaagctctaagtgtgcctttcttcatgctccagaacacatgccctcctgcacaaataattcacaatcttcctgcaaccagccatcaccagacgctcagctgacagaaaattgcaaattagctcactgcaacctcggcactatcagtactgcgtaaagccctctccagcatacagcacgagcaccatcctgtcccgtccctagcaagcctctgtctccttgcagacagccccttctctgctgtgctgcctgttgcaaatttgcaacgcattttctttttctttttttctttctttttttgttttttgagacggagtctcgctctgtcgcccaggctggagtgcagtggcgcgatctcgcctcactgcaagctccgcctcccgggttcacgccattctcttgcctcagcctcccaagtagctgggactacaggtacgtgccaccactcccggctaatttttttgtatttttaatagagatggggtttcactgtgttagccaggatggtcttgatctcctgacctcgtgatccacctgcctcagcctcccaaagtgctgggattacaggcgtgagccaccgtacccggccttttctattttttttttttttttgagacaagttttcaccgtgtcacccaggctggagtgcaatggcgcaatcttgactcactgcaatctctgcctcccagactcaagggattctcctgcctcagcctcccaagtaaatgggactacaagcatgtgccaccacgcccggctaatttctgtatttttagtagagatggagtttgccatgttggccaggctggtgttgaactcctgacctcaggtgatctgtacgcctcagcctcccaaagtgctgggattacaggcgtgagccatcactcccggctgcaacatattttcataccttctctaataaatgtgcctttctttacctataactgtcttggtaaattcttcttactcctgggctactggcctcagatagttgccgctcacctgagacaggggtgacaagacggcttattcatagaaagcataatgaccaaattagaagaactgggatatccatcaccttaaacatttatcttttctttatgctgggagcatgcaaattattctcctgtagctatttttgaagtatacagtgggttatggttaactgcagtcaccctactgatctatggaacactatgtcttatttcttctagctaactgtatattgtacccattgatcagcttctcttcttcctcccctccttgctatccttcctggcctctggtaaccaccaatttactctccatctttgtgagatccacttttttttttttttttgagtcggggttttttagtagagacggggtttcaccatgtgagccaggatggtctccatctcctgaccgcgtgatccgcccatctcggcctcccaaagtgttgggattacaggcgtaagccaccacgcccagcctttttttttttttttttttgagacggaattttactcgttacccaggctggagtgcaatggcacgatctcagctcaccacaacctccgcctcccgggttcaagcaattctcctgcctcagcctcccaagtagctgggattacaggcatgcgccaccacgcccagctaattttgtatttttagtagagacggggtttctccatgttggtcagactggtctcgaactcccgacctcaggtgatcctcccgcctcggcctcccaaagtgttgggattagaggtgtgagccactgcgccaggccgagatcccccttttttttttttttttttttgagatgaagtctcgctctgttgcccaggctggagagtgcaatggcgcaatctgggctcaccgcaacctccacctcctgggttcaagtgattcttctgcctcagcctcctgagtaactggaattacaggcgcctggcaccacgcccggctaatttttgtatttttaggagagatggggtttcaccacggtgaccaggctggcaaagatccacttttttagtgttcatgtatgagtgaaaacatgcaatatttgtctttctctgcctggcttatttcagttaatatgatgaccttcagttccatctgtgttgttgcaaatgacaggatttccttcttattggtggctgaataatattccctttgtttatataccacattttcttcatccattcatccattgatgtgcgcttgggttgactccatattttggctattgtgaatggtgctgcaattaccatgggagtgcagatatctcttcaatatgctgatctccttccttttggatatataccgagtagtgggattcatctgaaccattttttttttagactagtcaagttcagtagtgagaagggagcaaaaagtagaacaaggggccaggcgtggtggctcatgcctgtaatcccagcactttgggaggctgaggtgggtggatcacttgaggtcaggagtttgagaccagcctggccaacatagtgaaaccccgttccactaaaaatacaaaaattagctgggcgtggtggtgggagcctctaatcccagctactcgggaggctgaggcatgagaattgcctgaacccaggaggcagaggttgcagtgaaccgagatcgcggcactgcactccagcctgggtgacagagtgagactccatctcaaaaaaaaaaaaaaaagttagccgggcgtggtggcgcacacctgtaaccccagctactcaggaggctgaggcaggagaaccgcttgaatccaggaggcggagattgcagcaaactgagatcacggcactgcactccagcctgggcaacagagtgagactccgtctcaaaaaacaacaacgaacaacaaaaaatacaattgcaaaccaccaccatttgacactgcctatatccacccccaaccctgctccagttgtttctttgcaattgccactttccagcatactatataatttacttttttttttttttttgagatggagttttgttcttgtcgcccaggctggagtgcaatggcgtggtctcagctcattgcaacctccgcctccctagttcaaacgattctcctgcctcattctcccaagtagctaggattacaggggccccccaccacgcccggctaatttttgtattttcagtaaagacagggtttcaccatgttggccaggctggtcgcaaactcctgacctcaggtgatccacccacttcggcctcccaaagtgccgggattacaggcgtgagccaccgcacctggcctaatttacttctttatgtagtctattgtgtatctatcttttccagggaacctcagctccacaagggcagggctctcttgtcactttggtttatggccatatcacagagcccatcccagtgcctggcacatattaaggaatgcattaggattccaaaaccagccaggagcggtggctcatgcctgtaatcccagcactttgggaggccgaggcgagtggatcacgaggataggagttcaagaccagtccggccaagatggtgaaaccccgtctctactaaaaatacaaaaaattagttgggcgtggttgtggacacctgtaatcctatctattcgggaggctgaggcagagaattgcttgaacccgggaggcagaggttgcagtgagccgagatcgcgccactgcactctggcctgggcgacagagcaagacgccatctcaaaaaaaaaaaaaaaaaaaaaaaaagattacaaagcccagaatgccacaagaccacaggtggtgcagtgaacagggcattgccttgagagtctatcatccctgggcaagtcattaaacataggggtgggggtgggagcctcctgtctgtaacgtggaggtgtcacgtgccaagggctcaggcacacgcgcgcgcacgcacaaacacacccattagtaaggacacgacccctggcattctaatgcgatttatacttttccatgaaggaattcatttccccctctcactaaccccagagacaggtagagccgacaggtggaagaactgaggcccgagagagacagcgggggaccctccccgcgccacggcacagcagctgtccgaccccctcctcacgcccggggggcgcgacggctgccgagggtcgcgggcagggggcgcggcgccggggactacatttcccaggagcagttgccgcggttccgccgttcctggggtttcaagagcctcgcgttaaagggggcgggggaggttgcgcagtccgccagctggaagatggctctgcgcccggtggggacccgagagccgcctgcctgggtgcccaggcggggtccggctgcagtgaagaagccccccagctctgcagtgtccctgaggggaggcgaggcgaggcgaggcgaggcgaggccaagccaattggaggccgtctttcctcgtcttgcccgcctcggcttcggcctctgcgcccaagccccagggaaccccctcccttcccctccaactccccggaacaggggaaggggcggtgaacctcgccgcctggcgggagaaggggtgtccactagctggaagcccctgcaacccgaggcaacccctttccccaattctggcttcagttccgggaatttacaggtcgctgggatgggcggggagaagggacaggagagatacaaaatgaaatgaacgcccaggtgtcagggagctgagccttacagtaccccgcccccaatccatccttctaagtcccgggcctccgcggtaaaataggggtgatggggatagtgatcaaaggcaggaggcgcaaaggatccagaaaccggtggggagcactgtgcaaactgtaaagcgctgtgcaaataaaattattgatcgtcgtgtcattggattcatccagtctttaagacatgcacggatctggggcgggggatggggtgacatggttctgggctctcagggtggaacatctcggatacggggagggggggctatttgggtgcgtattaacccaaccaggtcttaatgggaacccgagttgtctttgaaaataaccaaaacaaagccaccagaatgttgtgttttcaaatgacgaaacttaagagaaattgacaccatcaaaagacgaaccttgaccttttgaactaacctgaccccccattgcttcccttccccgcctgtgccacggagataagcccagagagaaggcatctgacaccgagtcttgcgctccccctcccccttcctcccctaatcatttggattaatccatcccttggcgtgcgggggaaacccattaatttgtcctggcttcagagactcccaggtccagtaggagccctcccacacccacgcagctacgatcccgtccccaacatcaaaaccctcgaacccctcccctttacccctccccagtagcccactgtgtctgcaaacagctcttggaccataccgggatgcgttcatcattttgaccagcaacaaactcccactcccagggtattgtttaagtgaacagtgaccggcctctatgcttagggaataaaagcggggttgtgggagaggggcccagggagcaaacgtcgcagaatctcagcccagggccgctgccaagcggacccggcacgtgagtaggaggtcggccgcagacaaggggtcctagggtctctgaggtctctcctgctggcctctgggcccctaaagcccctcgagcttcagaactccctacagacagtggcgccccgtgtccgcctcgtctacacctgccaagcagcacgggaaaatctgtgtgcattttaacaaagacatcgcatcttcccagcaaaatggcggtggtcgcggccacggctctctaaacaactccacactttccgaggacaggtcacaacccaagggacataaccccctcctcgacctctaccctagcgccccgctttcccaagtccccaaagcactcagggcctctcctcattacaggggccccccggaccgtccctggttagagcttctggggcagcttctccattgtggaccgccctcccccgcccccacattgccttcaaggagccttgggacggggactgaacccccaggctgggcctcacggatggggggcagcgagttctgtctctgacaccccaaaacttccaggctaagagaagcacacaaatgaattcccgattagggtatatgggagatgtaggggtctttgaggagaagaggccacccgggaggccctcctcatctctcagagggtccgggcagcactgggggttcggcctcaggagggaacctcaaggcagaggtcggggggcgcgctgggggagagacggcagaggagggggaagggacaaagtttgaaagtacccttccaactctttcagggaaagtttccttgggggccccatggacagagggggtagaggtgtggagggaccggtggcggggtgacccccgagaggtgaccggaccccgggggagcgacccctcccccctgtcccggctcggcccggctgggagtcgcccagctcggggccgcgtgtgttagttggggccgctttccggcagctccaccgggctaggggaccccgcagcgggccgggagcagagcccccggtagcctcaggggagagctttgctacggggggtttcccgcaccgaggctccctagccccgcagagccagccccccgcaaaggggaaatgtgccggcacaccagcggtcctcggcgccgtttggggtgcgtggcgggcgcggggggcggcggccgggccagcgggccgcccggcggggaagcccagggagccaggcagcggcccagggcggcggcggggagcaggaaggcccgggccggggggaaaggtcggatttgctcggcggaagaaacacagatggcggcggcgcagcgccattccgggccgggagcaggcagccagcagccctgtcctcaccgcggtccgcccgccgccgctaaatacccggatgcgccgcccaagcgccagacgcggagctgggaaaagggaggcagaggaggcggaggcagaggcagaggcagaggcagagcccgagcccggtgccgagaccaagcgacagaccggcggggctgggcctcgcaaagccggctcggcgagctctcccgacacccgagccggggaggaaaagcagcgactcctcgctcgcatccccgggagccgcactccagactggcccggtagtcaggggctcaggagcagatcccgaggcaggctttgctcagcctccgacgagggctggccctttggaaggcgccttcaacagccggaccagacaggccaccatgaccgagaattccacgtccgcccctgcggccaagcccaagcgggccaaggcctccaagaagtccacagaccaccccaagtattcagacatgatcgtggctgccatccaggccgagaagaaccgcgctggctcctcgcgccagtccattcagaagtatatcaagagccactacaaggtgggtgagaacgctgactcgcagatcaagttgtccatcaagcgcctggtcaccaccggtgtcctcaagcagaccaaaggggtgggggcctcggggtccttccggctagccaagagcgacgaacccaagaagtcagtggccttcaagaagaccaagaaggaaatcaagaaggtagccacgccaaagaaggcatccaagcccaagaaggctgcctccaaagccccaaccaagaaacccaaagccaccccggtcaagaaggccaagaagaagctggctgccacgcccaagaaagccaaaaaacccaagactgtcaaagccaagccggtcaaggcatccaagcccaaaaaggccaaaccagtgaaacccaaagcaaagtccagtgccaagagggccggcaagaagaagtgacaatgaagtcttttcttgcggacactccctcctgtctcctattttctgtaaataattttctccttttttctctcttgatgctcaccaccaccttttgcccccttctgttctgactttataagagacaggatttggattcttcagaaattacagaataattcatttttccttaaccagttgtgcaaggacagcaacaaccaatctaatgatgagaatgtacttatattttgttttgctattaacctacttacggggttagggatttgcggggggggcttgtgtgttttgttggcttgtttgccatgaaggtagatgtgggtggggagaagacacaaggcagtttgttctggctagatgagagggaacccaggaattgtgaggttagcaggaatatctttagggtgagtgagttttctttgagttgggcacccgttgtgagagtttcagaacctttggccagcaggagagaggtggtagggagcagccagccggcaaaggaaggagggggaaaaaaaccgccaccgggctgacttccacctcccagtggtgagcagtgggggcccaaacccagtttccttctcatttttgttagtttgcgctttcggcctccctattttcttagggaaggggagtggggtccaagtgacagctggatgggagaagccatagtttctcccagtcagctaggatgtagccattgggggatctttgtggcttcagcaaattctcttgttaaaccggagtgaaaacttcaggggaagggtggggagtcagccaagtgcctcagtgtgccctgttgaaacttaggtttttccacgcaatcgatggattgtgtcctaggaagacttttcttttcctctggatttttgttcctcctgtacaagaggtgtctttgcttggtttggtggggctgcggccacttaaaacctcccgatctctttttgagtcctttattataagtagttgtagctgcgggagggggagggggagtgggcgggcagtggatagtaagacttactgcagtcgatttgggatttgctaagtagttttacagagctagatctgtgtgcatgtgtgtgtttgtgtatatatacatatctagggctagtacttagtttcacacccgggagctgggagaaaaaacctgtacagttgtctttctcttatttttaataaaatagaaaaatcgcgcacttgcgcgtcccccccccacccccttttttaaacaagtgttacttgtgccgggaaaattttgctgtctttgtaattttaaaactttaaaataaattggaaaagggagaaactgagcggtgtatttttcctcactttgaagactggagaatgaatgcggagcggttaggcgggcaggcagtggggacatctggggcgtttgcacctgagaatggcgggggagggttcaggagctggacagaagccaggaatccttagtcccggaggctgcggaacgtgccttagccggcttctaggcttctgcctttggggtccagagggtaccccatttccggccgagaggtgagtacgtgggaatgcggtggggagtctggtgggcttggccctgacgcgacttcctccgcccccttccctcccctctgccatccggacttcggcagtctcaacttacaagtcaagcctctcggtccctggcggatcccgccaggccccgcccacccgtcctaggcccgcctccccgcctttttaagcgagcccccctagctccgattggctgctggagcccggcccccggccacgcgaccaggctgcgtccgcgatgcgcacggctcccaggcaggcaggcgcgctcgggcgaggtaggagcgatgtggcctgggaacgcctggcgcgccgcactcttctgggtgccccgcggccgccgcgcacagtcagcgctggcccagctgcgtggcattctggagggggagctggaaggcatccgcggagctggcacttggaagagtgagcgggtcatcacgtcccgtcaggggccgcacatccgcgtggacggcgtctccggaggtaacgctccgttccgggagtcgttccaagacctttcccgagcttgcgctggaatggaggtcctggaggtgggggtgggcggctcctacactcttagctactgttccccttcgcatctctcagggcgactttatggcttcctaatattgactcttgcctggttaaacccttttgacggagggaggcgatttgcccagcaagaaaacccgcatttcttgagcggctcctttgtgaaggtctctaccaattgttgctgcacgtgaactcctgctaacttctagacgcaggaatgactaattccactttacaaacgaagaggctgaaatccacagatgtgaaatggcttgcccaaaagcccccagctagctgcaggcagcgctggaatattggagctggaacattgcctgactggccagagaggacagcttgctgggtaaactcatagcaagcaaggggtcccagggctgccacagaaatcacatgatgagttggccctgccaggtctccctcatttctttctttccttttttttttctgagatggagtctcgtcttgctctgtcgcccaggctggagtgcagtggcgagatctcggttcactgcaacctctgcctcccgggttcaagcgattttcatgcctcagcctcccaagtagctgggactacaggcacgtgccagcacacccggctaatttttgtatttttagtggagactgggtttcaccatgttggccaggctggtctcgaactcctgacctcaagtgatcctcccgcctcagcctcccaaagtgttgggattacaggcgtgagccaccactcccagccctccctcatttcactctaaccagtggttacacctgacttattcgtgtcaggcctcaggtgagtggtaatcatcaacaagctcccaaagctgccttctgcccaggaaataggcatagaacccttggtgctgttgcactcatttgtaaaacagaggtcccaggtaatcccttctctccctcaggggaagcttagagccggtcaaaagatgggaaattaggagacccaagttctcatcctgtttttgcctttcccaggctgtgtgaactttcccctctggctgtttgctcctaaggtcagctgtgttcactctgggctttagaattcggggactggtatctcaggcacctacctttgggggtgtgattctggcagcaaagtaaactgtggagttccaggactgcagcaggcgtctgatccagccctcttctttaaccctcaaggaaaccaaggggtcagataaggagtcagtggtggtcttcaggcacaggagaagcctgtgaggaagggctgagttcctccttgggtagaatgtgattcaaagccagagtttaggctgggcacagtggcttgtgcctgaaatcgtagcactttgggaggccaaggcaggaggattgcttgaggctaggagttcgagaccagcacggacaacataatgagaccccatctctacaaaaaataaaaaaatttaatcgggcatggtggcacgcacctgtagtcccagctactcaggaggttaagtgggaggattgcttgagcctgggaggttggggctacagtgaaccatgattgcaccactgtactccaacctgggcgacagagctagaccctgtctcaaaaaaaaaaaagtttaaacttcttgctcttcaagatgtgtagcactgacgctccttctgtagctgttgaatttggtgcctcctcaatggtgactccaggtctgtttcctttctggaccatttccccagggcctggcactgtcatctttccaggcctgcccttgccccacctgagctgctgtatccatctcctctccttcacctcaggaatccttaacttctgtgccaacaactacctgggcctgagcagccaccctgaggtgatccaggcaggtctgcaggctctggaggagtttggagctggcctcagctctgtccgctttatctgtggaacccaggtacacagtgagtggtggggggttgtggggactgaccccagctgcctgcttcccacagtcagcaaggctggtttagccagctcagctcagccacagccctgggcctactgttggcctcagagctgtgcagcagaaaggctgagtgcaggcctctgttttgctgaaaagctttggccaaggaactttatatatatattttttctttttgagacagagtcttgctctgtcacccaggctggagtgcagtggcacaatcttggctccctgtaaccttcgcctaccagactcaagggattctccatgcctcagcctcctgagtagctgcgattacaggcatgctaccacacccagctaattttttttttttttttttttttgagatggagtctcgctctgtcgctgaggctggagtgcggtggcatgatcttggctactgcaagctgcgcctcccaggttcacgccattctcctgcctcaacctcccgagtagctgggactacaggcgcctaccaccactcccggctaattttttgtatttttagtagagacggggtttcactgtgttagccaggatggtctcgatctcctgacctcgtgatccacccaccttggcctcccaaagtgctgggattacaggcgtgagccaccgcactcggcctaatttttatatgtttagtagagatggggtttcaccatgttggccaggctggtcttgaactcctggcctcaagtgatctcctccaccttggccttccaaagtggaaactgcctttttgagcattcattttcccacctgcaaaacagagtccctcacacctgaccttctataagaaaagaggagtaggcggcaggaactgagactaagggctctggggctgttctgacgggagcacagttgccagtgctgccctttagtgtccctgttcctgtgggcaagtatcttaacttttctctgtctcaattacttcatagggaaaatgaagataatagcacttaataggatcattacaaattaaagacttaatacatgtaatgcttagaataggccgggcgcagtggctcatgcctgtaatcccagcactttgggaggctgatgcaggcggatcacctgaggtcaggagttcaagaccagcctggccaacatggcgaaaccctttctctacaaaaatataaaaattagctggcatgatggtgggtgcctgtaatcgcagccacttgggaggctgaggcaggagaatcgcttgaacctaggaggtggaggttgcagtgagctgagatcacgccactgcactccagcctgagcaacagagtgagactctgtctcaaaaaaaaaaaaaaaaaaaaaaagcatagaacagcctggcacatagtactgctcaatgaatgttggctattatttattttccaaatgttacaaaataaatttatataagtatgaaacttaaatagtacttattatgtgccaggaattcttttaagaaaattacaactattggccaggcgtggtggcttatgcctgtaatccaggcactttgggaggccgaggtgggtggattactgagttcaagaccagcctggccaacatggtgaaaccctgtctgtgctaaaaatacaaaaattagctggccgggctcgcttgaacccatgaggcaggggttgcagtgagccacgacggtgcgaccacactccagcctgggtgacagagggaaactctgtctcaaaaaaaaaaaaaaaagaacattacaagtattaactcattaatcctaagtgatagttgctattcttattcccgctattgagatgaggacactgagatccagagaggttaagtgacttgcccagaggcacacagcctgttgtgggatttgaaccctggctcaagagtccatgctggctgggcatggtagttcacacctgtaatcccaatacttttggagcccaaagcagaaggatcacttgatgcctggagtttgagaccagcctgggcaacatagcaagaccctctctctaaaaaaaaaaaaatgtttttaattagctgggtgtggtggtgcgcacctgtagtcccagctactagggaggggaggctgagttgggaggatcacttgagcccaggagttcaaggctacagtaagctatggtctcactactgcactccagcctgagtgacagagaatccctgtctcatttgccaaaaaaaagaaagagtctgtgctcctgactacttgtgattatcattaactgccctctcagaaaggtgagagtgaaatgaatgtcagaggcagaactcctgactcgcatccagtcacttcccagcaaagccctcacccagacccaacagttttcaaatttacaaattagaggcccaggtgaacccagaattacctctgtgatctttttcttcaccattaggcgaccaaaaaagacactcagtatggtgttaggaagacacatctttcttctccacgagtgcccgtaattccaccattagactgccactgtaaaaccaaagtctgcccagggagggaacctaacaggtccccagttcctcagtgggaactgtctgtcagattcctggcagctctgggatagcccatgtgtggcagaaagtaaggagactgaggctgcaggctttctgggttgggtctctgtggtcctccaagcctctgtcccctcgaacttgtcccacatgaccccacaggcatcaacacgtgtctcactcattttcttcagagcatccacaagaatctagaagcaaaaatagcccgcttccaccagcgggaggatgccatcctctatcccagctgttatgacgccaacgccggcctctttgaggtgtgtggaagctgtcctgcgggtgagggttggtggggcctgttaggctgaggaaggcttgggtgtgggcagtcgggagaacctagcaggattcagtgccatgcctagaggctccagagcccgcttctggaggtcaaggttgggccaggtaggtgctccaggaggaatcctggggcttgcagggagcctgagttccagagcctttgggggataagctacatcagctggaaggctgggggaggcgggggcctggtactcaccaaatatattctcacctcctcttactagagcagggcgctggtccagcccggcactgagacacgggggccccagagagaagcacagaacaccttgcctctctacccagaggagcgccctggctggcagtacagttttttgatttgctggagtcccggtcaagggagaagcccagggtggttaaatgatggctctacgctcactgcctccctccaggccctgctgaccccagaggacgcagtcctgtcggacgagctgaaccatgcctccatcatcgacggcatccggctgtgcaaggcccacaagtaccgctatcgccacctggacatggccgacctagaagccaagctgcaggaggcccaggtggggcgacgcctgggtccaccctcagcctccgcctggggaaggaagtgaggcttagagaggccaactcctcactcacagagatagcctgaaagtttgaaacagcagagatttgtccaagatgtgaacccagatccctcacacccagagcattattcttttttttttttccctgagacagagtttcactctgtcgccaaggctggagtatagtggtgtgatctcggctcactgcaacctccacctcctgggttcaagtgattctcctgcctcagcctcccaagtagctgggattacaggcatccgccaccccacctggctaatttttgtatttttagtaaagacggggtttcatcatgttgtccaggctggtctcgaactcctgacctcagttgatttcacccacctaggcctcccaaagtgctgggattatagacgtgagccactgtgcctggcaccagagcattattccattgtgccatggtgccttgaggtttttccctgtgtatgtgtgacagtctcactctgttgcccaggctgtattgcaatggtgcagtcatagctcactgcagcctcaatcttctggactcgagcgatcctcccacctcagtctcctgagtagctgggactaccggtgcccaccacacccagttttttatttatttgttttttagatggaatttcactctttttgcccaggctggagtgcaatggcgtgatctcagctcactgaaacctctgcctcccaggttcaattgattctcctgcctcagcctctggagtagctgggattacaggcacacaccaccgtgctcagctaattttctatttttagtagagatggggtttagccatgttggccaggctggtttcgaactcctgacctcaggtgatctacctgtctcagcctcccaaagtgttgggattacaggcatgagccaccgcacccagcctgtttgtttgtttttgagacagggtctcactataatgctcaggctagtcttgaactcctgggctcccaaagttacaggcatgagccaccatacccagccagtttttaaaatttttagtagagacagggtctcactatgttgcccaggtgggtctcgaacccgtaagctcccaaagtcctgggattacaggtgtgagccactgtgcccggcctgccttgagtattagcaagcaccttctgtgtggcaggcccttgctaggcataaggatagaatgtacatgttggtgagacctggtcccagcctagcctgccctctgggaccttacacaggagactgagatgtgagcccattctcactgtccagagctcagggtggagatgggtgacgctgagaggcacagatgagggagaggatgttccagcccccaagatggtggtacctctgtgcccacctctgtgctgggcactgggcaggatgagctctcagagctccaagcagcacaagagacgggtggtttggcccaacttgacaccacccaccatctgctcatgtctttcctgcagaagcatcggctgcgcctggtggccactgatggggccttttccatggatggcgacatcgcacccctgcaggagatctgctgcctcgcctctagatatggtgccctggtcttcatggatgaatgccatgccactggcttcctggggcccacaggacggtgggaccatgtggcacctgaggcctggggtggggcttctgagggtggctgggaaacgaggaggccagtccccagcatgatccataatccctgggctctcaggaggccagtgacagcagcggtggcttcccttgcaggggcacagatgagctgctgggtgtgatggaccaggtcaccatcatcaactccaccctggggaaggccctgggtggagcatcaggtacctgcaaggttgtgtccctggggtccccttgtccttttgaagggccctggaggggctcagggaagtggggagggcagcatggactgtactttcaggagggggttgggtaggctctggcccctgaccaacccctccccccacctcttcccttcttctcagggggctacacgacagggcctgggcccctggtgtccctgctgcggcagcgcgcccggccatacctcttctccaacagtctgccacctgctgtcgttggctgcgcctccaaggccctagatctgctgatggggagtaacaccattgtccagtctatggctgccaagacccagaggtgcgactcccagcagggcaggctcgggggcggagagacgtggtgagagccagcctcatgtgtctgcccaggcccacagacagctctgtgcccaccgggtctgcttctgcctgttcccctcccttctctctgtccctgcctctcccctctagcttctgtgtctccttcttatccctcctgtctttccacctcccttgttgttctccctgccccctgcctggctcccctctgcctcttagagcttgtaactgtctttgttgatccttcttgcagacttgggcatagacctcgggcctggtccctgcaaggagcgggtgtgaatgctccacggccccttagctacctgtgacaccttgtgcccacaggttccgtagtaagatggaagctgctggcttcactatctcgggagccagtcaccccatctgccctgtgatgctgggtgatgcccggctggcctctcgcatggcggatgacatgctgaagagaggtaagggtgctgagacaagggaactggtggtgggtcctgagagaagagaaagggaaacccctagactgtgacccagccccgtacccagccacgctgcggcctcttaggccagctgtctgtctaagcttgaacaccccaagccatgaggcagtcccgaatctgagacctggggcagttcccttgccctctgtgttctgcccccaagcctgttggttctggcacgcccttgctttctaccctcccaggcatctttgtcatcgggttcagctaccccgtggtccccaagggcaaggcccggatccgggtacagatctcagcagtgcatagcgaggaagacattgaccgctgcgtggaggccttcgtggaagtggggcgactgcacggggcactgccctgagctctgggtaaggacgagaagagccaaggtccgcctactgccacagggtcaaaggaggttttcgatcagcccagaccagaggctctgagccctgaaccaaagtcccagagctgggctgggacgtgacctgtgctgagggctgtgagaatgtgaaacaacagtgtgaaaattggctgtgacactctggtctgctttattgtctctgggcaggcccagtcctgtggccggttgaagaatcaggcaggagccagggctctgaggggaggcgcctgaggactgcagatctccactgacctctttccctagattaagatgggacccagtggccgggcacggtggctcaggcctgtaatcccagcactttgggaggccaaggtaggcggatcacctgaggtcgggagtttgagaccagcctgaccaacatggagaaaccccgtctctactaaaaatacgaaattagccaggcgtggtggcgtatgcctgtaatcccagctgctcaggaggctgaggcaggagaatcgcttgaacccgggaggtggaggttgcggtgagccgagatcatgccattgcactccagcctgagcaacaagagcagaagtctgtctcaaaaaaaaaaaaaaaaaaaagctggcacccaggcctttgggagataggcccagtccaccgtttgtctcgggtagtttctgtgctgctgtggagggctgctgagaactagccccacaggccttttaccctgccactgcccgctactctgcagcccctgagtctagtcttagagtctagcttcttccttctccccactggaagatgtcctgtagctgcccagataggaggaggctgggtgtccatgtttggaaggagaggcagaggattcaggcccaaaagaaaagaatgaggatcacccctggggaagctccagacagtctggaaccctgtgttcgcgcccactctctccctgccttactctggctttcggcaagctccagtccctgtgtgtgcctcagtcctcctgccactatgccttgaggtctgaggtccttccatctcgctcattccaaggcctacgatgatcagccaccagggggtgctgcgagcacgggccgcggccgccggctcgccccgcccctccagactgggggccttgggccgcggctgttcaggctgcccagcagtcaaggccaggagaggcgatttgctgctgccaaggccccatcctcccttgtgccccacaacggctcgccgctttcctgttggaggggcctgcgggaggagggcggtctctccctggcgaccttgtggaccccttgtggggtggggagtggggtccccgcagctccaccctcagcgtggtgtgaccttgggaagctcttagtttgcttgggacagaggacgaaaaggccctttatcattaacgacatgaaactagccctacgtctctctctgacgtcctgcacctccagcccacccatttgcctgttatcttgggatgaacaatgtaatatgagctgggctctggcccagccctgcaggatctgaaagctgggattcagggaatcccagcctgcgatccggaggaccttgctgctggggtccaggagctgggggagggggggtgtggggggtcggtgtgagggtggaaggcagcctggctggggtagctgtggccacattagcggcaggaacatttgcagcccaccaccaccggctagggcacgtggcaccaggcgcgctgctgcaggggatgtgcacaagggctcaaccagtaatgtcgagccagcagctggatgagcatggtctgctctagccagcagctcatgttaagcgccacgggcagctgcggggtgacgtgtggcagtcggtgtgctgcacccggcggggccagaacagagggcccaggtccacccagaccgacgtgaggcggcacgaggcgagatccagacagcggcgcagaaagtgcgtcgccgcccctgtggctcccaggagccgccgctggcgttgccctgctgcgctggcagcgccgcgaccccctgggctagccgatcgcggtagggctccacgccgttggccaacccgcggctcagcgtgtcctgctgcaccagcccgggtccgccgccgcgcttcttccgcagtcatccagaaggtgtctgtaggaggcgcagcagccgctctgggtgcacgtgtttcggcttgggcgcctaccggtagtcgccggccgcccacgacaagctgtagggccacgcggggcgggagggccggccgtggaccagctgcaagtctgcgttctgcagaatcagaggctctgaggaccgccccaagggcgcaatgtccttgttctctgcgtcgcgcacggggttcagggccgcgggctaccagaagcggcagtaggagtggatggaggtggcaccgggcgcacccaaggtctaggctcacggccgcgctctttatggccgcctgttccttcctccttccctccacctccgctctcatatcagcttagccttgccgctgctgggagctcatcgccctaggccaagaaggaccttgtgggcagggggctcccaagggccaggagtgcgaagtcatgaatctcagatgctttccagcccgttccagggttcaggcatgcacattcgtccaggcttctgggagtctaagggtgcgttactttcacgcagtggttgcaggtctgtcaaagtttctaaaatcccaccaagctgagtctcgccattcagggatcataagagtctacaattcctttgcgcaattcaattctgaattcaattcagaattaattcaattctggccgggcgcggtggctcatgcctgtaatcccagcactttgggaggccgaggcgggcggatcacgaggtcaggagatcgagaccatcctggctaaaacggtgaaaccccgtctctactaaaaatacaaaaacaaaacattagccgggtgtggtgggcgcctgtagtcccaactactcgggaggctgaggtgggagaatggcgtgaacctgggaggcggagcttgcacttgcagtgagctgagatcgcaccactgtactccagcctgggcaacagagcgagactgtctcaaaaatatatatatatattaattcaattctgaagcttctgaattcaggtttggcaagtctagattagattcctaatagtttcaattccgtgagactctgcttccaaaaattgaggaatttctgcatctaaagaaggtgacatcaggctctatagaggcacctctgagccctcgtgaaaaccccggggcctttgaggagctggttcttttcttttctttttttttttttttgagtcttgctctgttgcccaggctggagtgcagtggcacagtctccgctcactgcaacctccgcctcccgggctcaagccattctcctgcctcggtctcccaagtagctgggattacaggtgtgcaccaccatacctggctaatttttagtagagatgggtttcaccatgttggccaggctggtcttgaactcctgacctcaagtgatccaactgccttggcctcccaaagtgctaggattacagacatgagccaccacgcctggccttaaggagctagttctgagcatctaccccagctcctccggcctgggatgcgagtcctggctccatcagcgcccctcacactgttttctctccccttacgcacttccccttgatgctccccaaccccagccccagcttctaaaaacactacactcagcccctccacctctcccctcccttccttaactcactgcagactgccttttgccctcaaaacacctgtccagtttaccagcagcctcctcattgctgaatccagtgtaccttgctccccaggtgctagcctccctaaccctctggaggcatttggccatgtggcccctcctccacacagttcaggacagaactccatgaccaaatcacacagccgttcaccaagacctattctcctctttggctcttgcctagacgagaggctcctaacaggtcactcatcaaatctctcccactctgtccatccttttcaccccgggcaataatagacttttttttttttttttttttgagacagagtcgctctgttgcccagtctggagtgcgagcgatctcggctcactgcaaccaccacctcccaggttcaagcgattctcgtgcctcagcctcctgagtagctgggattataggtgtgagccaccatgcccagctaatttttgtatttttagtagaggcagggttttgccatgttggccagtctggtctcgaactcttgacctcagatgatccgcccacctcagcctcccaaagtgctaggattacaggtgtgagccgctgcgcctggcccataacaaactttttacaaaagataatgtggggggaaaaaaagaaagaaagaaagaaaatgtgcgggtcatgtctctgctgtagaatcttagtagttccccgttgctatcaggtaaagccagactttttggacaggtacctaaaccatctgggctccagctggactaaggctctggaaagagcttccggagaaggatctcaggatttgcagagcctgagggaggagtctctggagtctgccgaaaggagactcaagtcctggtttcccactccaggaaaccccagtcaagactaggaatcctttttttttttttttttttttttttttttgagacggaatctcgctctgtcgcccaggctggagtgcagtggcacgatcttggctcactgcaacctccaacccctggcttcaagcaattctctgcctcagcctcccgagcagctgggattacaggtgcccgccaccacacccagctaatttttgtatttttagtagacatggggtttcatcatcttggccaggctggtcttgaactcctgacctcatgatccacctgtcttggcctcccaaagtgctgggattacaggcatgagccaccgcgcccagcctcttctttttttttttttttttttttttgagacaatgtctcactccatcacctgggctggagtgcagtggcgtcatctcggctcattgcaacctccacctcccaggttcaagcgattctcctgcctcagcctccagagtagctgggattacaggcgcccgccacgacgctcagttaatttttgtatttttagtagagacaaggtttcgccacattggccaggctggtctcgaattcctggcctcaagtgatctgcctgcctcagcctcccaaagtgctgggattacagacgtgagccaccatgcccggcctaggaaccttttctaaacatggattggagcaagaaggtgcagggataggggatggagtcacatcaggctgggccacaggaggtgggagtgccagagactggctgggccctgggcacagaggggttaactacaaagcaaatcacagagagcgagatcaatgggttactggctgcagagagaggaaaaggcagcagcaacgcagagaggcagagaagagccaggcagaagagcctgccacctgggggaaatcagggactgaggaggaagtggccagtggctactccagagggagtgcccaactccggctcagcagagggggcagaggagaggaggggccttaaaggcaaagggggagaagtagaaggcagaccagtacctgcagggaggcaccaaggggcagccgctgaatcaggaggcccacccagcccggccattccacccaggatcaagcccactgcccaaggcggaggtgggtgttgcccatcctgggctttggggacctactgcatgctgggtgctgggatgggggcagacattgcctttcttccctactccctgcctgacccccctttcccctactttgtcccaccaccccagtggtctcaagcctgcaaggagatccacaggcagtaggagacatgggctgtagagtgggatgggggtgagcatgggtgcggtgtgcacacacacaagttgtcagaggcaccacctgttacaagctctcagatgagcactctagcttaagaggcaggataccagggtggcaacagccccagagctgccatttcgagtgtgatattatcctcccatgtcccctctctgggcctcaatttccctatgtgcagagaggaagcagtgacctacacggtcttcccagttttgccattgtgatgatctcactatactggaccctccaatgactcagggatgttacccgtgttttgctaaggctacagcttgtagccagagaaagccctaaacccatgtcccagggtctcccctgagcttcagatccccattgagaaggaaaacataccagtttctgggtttggcccctccccccatcgccatatcttcatcctacttcgcttgtgccttccccagcctcgtgggttgaaagtgtccctcaaatacctaggtagtcctccaggcaggactccaggggtgttccttaggaaactgaggaactctcaccccttgaacaccacgagcttgctcacacagtgacactcagcgatgactttggctctgctctcccctcctccatctcccacgagcttccagcccagaacacctggccagacccaggtcgggggagttagatcccggggtcaagcaaccagaactgggggctcttgcctgaggattccagcttctcttcccaggtgcccgtctgatggggagatggctgatgcccagaacatttcactggacagcccagggagtgtgggggccgtggcagtgcctgtggtctttgccctaatcttcctgctgggcacagtgggcaatgggctggtgctggcagtgctcctgcagcctggcccgagtgcctggcaggagcctggcagcaccacggacctgttcatcctcaacctggcggtggctgacctctgcttcatcctgtgctgcgtgcccttccaggccaccatctacacgctggatgcctggctctttggggccctcgtctgcaaggccgtgcacctgctcatctacctcaccatgtacgccagcagctttacgctggctgctgtctccgtggacaggtgcgctgtgcctggggcctggctgggcagggctgtgggggcgggggttgggggaggagtcctgaacagatcctcactggccttaggaaggagagagtgggggaccagaaagggaggtgggtgggaggaaacaaaagctccctgacccctcgcaagcagcctctgggcacctgcagggcgtgcttgaggggactgtcctgcccttcccctcctccactgtgaacttccagaggacgcctctgagtctcaagtggcagcacagggtctggcacatagtaagtgctctgtaagcgcgaaatgaatcgcaaaagaagctcacgaatgcgttcatcagtttttttgttttgttttgttttgttgttttttttttttggatcttggctcactgcaacctctgcctcctgggttccagcgattctcctgccacagcctcctgagtagctgggattacaggccaccacacctggctaattttttgtatttttagtagaaacggggttttgccatgttggacaggctggtctcgaacccctgacctcaagtgatccgcccgcctcggcctcccaagtgctgggattacaggcgtgagccaccgcgcccagcccagctattttctaactgcccacacctggccaagctgtgcacacatctgcttccacagcttgaaacttggggtcaaatccaggctcactccagctgatgaccctgggcaagtcacttctctctggacctcatctgacgcatccataaaataatcctagaaataacaagtcaccgggatcgggcccttgctaggtgcaagggcctaagcaccttgcgcgttcacacccttaatccccgccacgtcccccacggttcacaggaggcgcactgggccgcagggcccgggcgcgggacgtggcgcgggcccctgcgggagggcacctgcccgccccgctgaccaggcgccctccgcaggtacctggccgtgcggcacccgctgcgctcgcgcgccctgcgcacgccgcgtaacgcccgcgccgcagtggggctggtgtggctgctggcggcgctcttctcggcgccctacctcagctactacggcaccgtgcgctacggcgcgctggagctctgcgtgcccgcctgggaggacgcgcgccgccgcgccctggacgtggccaccttcgctgccggctacctgctgcccgtggctgtggtgagcctggcctacgggcgcacgctgcgcttcctgtgggccgccgtgggtcccgcgggcgcggcggcggccgaggcgcggcggagggcgacgggccgcgcggggcgcgccatgctggcggtggccgcgctctacgcgctctgctggggtccgcaccacgcgctcatcctgtgcttctggtacggccgcttcgccttcagcccggccacctacgcctgccgcctggcctcacactgcctggcctacgccaactcctgcctcaacccgctcgtctacgcgctcgcctcgcgccacttccgcgcgcgcttccgccgcctgtggccgtgcggccgccgacgccgccaccgtgcccgccgcgccttgcgtcgcgtccgccccgcgtcctcgggcccacccggctgccccggagacgcccggcctagcgggaggctgctggctggtggcggccagggcccggagcccagggagggacccgtccacggcggagaggctgcccgaggaccggaataaaccctgccgcctggactccgcctgtgtccgtctgtctcactcccgttctccgaaggcgggacgccaccgggccagggatggggcaatgccacgagctctctgaggggcgttgagtggagcgacttgtccccgctccacagcggagcaccagcccagtggacacccctgggtgtgaatatgaacagcacagcccgcccccagcagggcagcccccagagcctgcccagagccagcctggcagtccctctgcccattcttccaactgggtgacacctaggccctgcttcctccaccacctcttaactatctccttcttggttccaagctcagtcctaggtaatttaacatcaacagctaataaatggctaatatttaagtgggaccaggcgcttggctcatgcctgtaatctcagcgttttgggaggtcgaggcgggaggatcgcttgaggcagcagttcaaggctgcagtgagccatgatcacgctactgcattccagcctagacagcaaagcaagaccttgtctctaaaaacatttattaagcaggtaccatatgcctcatgctacattctttgtcaaaacagctttgcaaatagatatgattaacctttcctttttttttttttttttttttgtcttttagagacagagttttgtctcccaggttggactacagtggcgccatctcggctcactgcaacctccgtcccccgggttcaagcaattctcctgcctcagcctccagagtagctgggattacaggcgcccaccaccacatccgactaatttttttttttaatagagatggggtttcaccattttggacaggctggtcttgaactcctgaccgcagatgatccgtccgcctcggcctcccaaagtgctgggataacaggcgtgaaccactgtgcccggctgtttagccccattttacagatgtagaaatcaaggatcatagagatttagtgatttgccacaccgctggtgtttggcagaggttggatacaaacccatggctgtgtaactttttctttttttttctattattattattattattatttttgagagagagagagagattgttatccaggctgcagtgcagtggcacaatcttggctcaagacaacctccgcctcccaggttcaagcgattctcctgcctcagcctcccgactagctgcaactataggcgtatgccaccacacccggctaatttttgtatttttttattatttttattttttggtagagatggggtttcaccgtgttggccaggctggtcttgaactcctgacctcaagcgatccgccggcattggcctcccaaagtgctgggattacaggcgtgagccaccgcgcccggcccagaggtaacatttgacatgtattttcttggacaaaggtggggaggggcatgccaggtagagcaacagcctgtgcaaggcaggggacgtgcagggcagtaagtggctcctgcagctgaggcagggagagattggggcaggggaggcctggagggcaggagcttcatccttcaggcagatggtgatgccactgaaggttttcaggagaggagggggcctatcagatgtgcagttcagaaagctcccagggctgctgtgtacaagctggaatggaggcctagacttggcagaggactccgatcaggtgggttctcctgggcccttcttggaagtgaggagactggtaaagagtctgctccgtgagctctgttgaggaaagccaacgaggcctggcctaggactgggaagatatttttgccgtggacttggcaggaagatggatggcctgctgccaggcttgggcttggttcccgaggctccgaggtttgcttcagggggctaatgaaacacttggaagagcagatggtcgtaataataataactcaggagagaattgtgtgtccagtagagcccaaggcaggcaagagggtcggagcggaggctgaattgagtcctggccactgctccccagggcctgagagaaccctcctgatctgagccctctgtcaagtgtagggctgagcctggggcagccctggggacctggaaaggcacttttcttagttggaaggaggtttggattctacaaccttcttaccttcctgtttgtgcaaacctcttaagaagaggcctggccggatcacgaggtcaggagatcgagaccatcctggctaacacagtgaaacaccatatctactaaaaatacaaaaaattagctgggcgtggtggcaggtgcctgtagtcccagctactcgggaggctgagacaggaaaatggcgtgaacccgggagacagagcttccagtgagccgagatcacgccactgcactccagcctgggggacagagcgagactccgtctcaaaaaaaaaaaaaaattactctttagggggcctggcgcagtagctcacgcctgtaatcctagcactttgggaggctgagacgggtggatactaggtcaggagttcaagaccagcttggccaagatgctgaaaccccatctctactaaaaatacaaaaaaaaaattggtcggccttggtggtacacacctgtaatcccagctactcgggaggctgaggcaggagaatcgcttgaacccaggcagcagaggttgcagtgagccaagatcgcgccactgcactccagcctgggtgacagagcaagactctgtctcaaaaaagaaaaaaaagatttactctttagggagctctttctggctgcccaggcaggctttcatagggaggaagtacagagtgtgctgactggagcagagaggtcagtcaggaggctcgtgtgagaatccagagagaaagacatagaggtattggaagtggtggggagacatggacagatgggtcagccacttaggaggtacaattgctaggacttggtgactgttggagggtaaggaggagagacgtgtcccagatgacaccccagacttctggcttgggctatttgggggtggcagtggggataactgagggggacagttttggtggtcatggtgggggtgcccgcagaatagcggtgtactctgagtacgtgccacgtttcacaaccactgtttgcaggtgggcaagggcagggagcttgtcctttcattccctgctgtcctcccacctagaacactgcctagcacatagcaagcactaagtcaataagtcaatatttatttttatttttatttttattttttgagatggagtctcactcttttgcccgggctggggtgaagtggctgaatcttggctcactgcaacctccacctcctgggttcaagtgattctccggcctcagcctcccaagtagctgggattacaggtgggcgccaccacgtctggctaatttttgtatttttggtagagatggggtttcgtcgtgttggccaggctggtcttgaactcctgacctcaggtgatccacctgccttggcctcccaaagtgttaggattacacgtgtgagccactgcgcctagcccaatatttctaacatgaaagaaacacgaagtataaggcaaaggatcttaacccgcaaggtgaaatcaccaaatgtttcttcttcctgccatcttctaagccttcctccgcacctccccgactcttcagtaattcgcagagcagccagcaaccagcaaaactcacccctgtgagtacaacctcagctgagctctctttcctgccctggcccatggccagctcagggaccactgagctctctatcctgcccagtccagccagctcagggaccactgagctctctatcctgcccagtccagccagctcagggaccacttgggtgttttgtgactcactccagtgtctgaggccgacttcatctggctggctcttcagacacaattggggttacaggaaatatcctggctggaaatggggtgaggcagattggctgtctacatggctgtctggcaagtgtttgatgactgacctataagccaccttcagtcaagcctttggttcactgtctacatggccagggagggagtcaacaatagacactccacctccgcaacggccagttctcctggatccatggctccagggatggaggatgctgcaggagacacaggccttgcttcccagctaaggactgtgggtcatctcagggcgatttcacagtcccagcatgccccagctctcagctctgcaaataccaagcagcctgcctaggggacagtgggctcaggagtgcccttggcaggtcctcacctatctgctcccacagctctgtagcaagggttctaaccttttttgagtgtgaagcctgctgagaatgagaatgagagctgtggacctgtttcccagaaacgcatgtgtgtactctccacacaaaaccttgcaccgtttcgggggctcacacctccctaagggctcgctaattgaaccccttgggcctgaggttgagaaaccttgcctcaattcttccccaggtgatcaggccagggtgagagaggacagacctggcaagcaggacccatgagaaagcccccttcctggactttgaggcccgctccctcctgcccctgcctcccctctgccctggactcctctctgctctgccccattcccagggccatggccatgggggggctgtgtttggatacaatggcaaccctgggcccagaaagtgggcaggctcacctggaggggatcagagtaacatggcaggaagcgagtgaaaagctaccccagaaccgcacctctgctctccatgtgactggggtgccatcctcccttacctacctcaggcagtggcctgagttccacgggcgcgccccacagctccctctgccgcctctcttcaggcttggggccactgcactttcccttccccagccctgccaacctggtggggcactgggcttccctctcacagggtcctggggacaggcctaccctacatctcatacccacagacagacccttttttcctccaaggcctggcctaggttctatgagttcaatgcagatctgagccataccaagctgggtttggggaacacactctcctcctctgaaaggtagacagggattccaacttggtgaaggggagagtagggcagagccaggcgggacacggactgatcacctggagaaagtcaccatcagcagccttggggcaggggcgggcccagcagtgccatcccctgggttttccctgagcaggcctccgctaggagcgcacgcttccttctgcctgtccatggcccacagcaaaggactggtgctcctgcagcggggagcggggctgctgacaggactgaacctcaaggtgagtttttggggcttcactacaatactagtttctggttgctgctgcaataaattaccacacacttagtgacttaaaacaacacaaatttattcccttagagttctaaaatcagccagaattataaaattagcctcactgagccagtccaggtgggagcagggctggggccttccagggctctgtgggaggatgcatttcctggctctgaggtggcctggactctgtggcttgagctgccctcctcaactccagtttcctgctccatcgctacacctccaacctcctctcccgtcacctgctcttctgttatacagacccgggtgaggacatcaagccctcctgaacaagctgggataatcttcctggcgaaagatccttaacttcattacatctgcaaagcccctttggccatacaaggtaattttgacaggttcctgggattaggacatgggcatcttgggaggccactactggcctaccacaactgggcagcaaaactattacaccctccggtataatagttttggtgtttcaatgactgggaggaaaagggttggaattttttgctttggggtccctcttaaccttgtatttttaaggtctgggactcaccaaccctccccttccaaccagagaaactcactgcagtatctccttgaaagtctggtgacgtgtctgtctaagtgctggtgagaggcacaggaccaactgagggcctcacgcagtacccctggccacagggtgcccgcctaagcccacacctgctgactgcaacaagcccatggccaggacggaacacagagaagggtctgaggcctggagcgcgccatgaaggccatggggcaagtgaggtctgctgagatagcgcaggtctgcggagctgaagtgcagctgcagaggctggtctggtgctgcgagaactggaagaagctgggagctgtggtccctgtccacagagatgctggaaactgtggctgggagtggctctgaggccgtggagagagagcatctctgccccacggcatctgcgggtgagggcaaggtcctcaccagacaagtgcagctccaagtcccagatgttgggctttttcttggtactgagacagcagtggggcagggtggggcagtggcaggaaggcagggagcctctcttgctacctcttctccatgctctgcatctgcagactgagggaggtgaagctggccaggaggtcagtcacttcatccacctgcaggacggaacagaggctctgttatgggacacggggtgtgccagggctcctgggtctcttccacaatcccacaggcacagaacacaggcacggtctctcctcccagggcgtgtggtggcttctgactacgcagcagttgaccaagggtcaatctttgacaccaggtggcctagcgctgtcctagagggcagggccatgaacacacactagccactggcaacttcaaaggaagtgaacggaggctttgaagcctgcaaccccacaatcataggctctttcccccactttttttgtttgagacagggccttgctctggtttttttttttgttgtttttataatttttgcctttttccacatgttctgagaggaccttgctttgtcactcaggctggagttcagtggcaatcacagctcactgcagcctcgaactcctagcctcaagtgatcctcccacttcagcctcccatagcgttgggattacaggtgtgagcccctgcggctggccccagcccacagcctctttctgatacgagtgtctggtggcatcggagcagggtggactggccctgaggctcctgccaggccctgggtctgggcctgtggctgcagctcacctgctctttggtactggtcatctgcaggcgggtgcagaggtcatccaggcgttctcgctgctcatgttgccctaggcgctccagatactccctcagcatatggatgatctggaacaagagggtgagctgagctgcctgggttcctagggaggcagacaggctgatgctgcttccaaaaagcacagtggagcaggtgccaactggggtcagtgtgaaacaacccaggagccctgggaccagaggcaggtgtgtctgtggttagggcagcatctgtccagtgctgccttggtgccgtggtctccacacagaaggggtactcacctgcttcacctccagacgcacagcctctaggcactgggcatggccctcctgcaggatattcagctttgacttggccaggtgcaggggtgtgcgaccagctcggtccagggcatctacacgggcccctgcaggtaccagctgaggtgagcattctgggggtgagggggagaaagaggacagagaggggaagaaaccacatacctcctcgtagcagtgtggtgatgacaggaacgtggttggtgcaggccgctgaggaagaacaacagagacttaagaatccaggaccaccagagcctggctctgcgtggccactggagggagcagggctgtgtctcccagacgcctgtgccaagttatgcctactgagaaggtatcgccaaggcacagctaggtaggactcagaagtcaagttcaactccctccctgtacagcagaggaaactgaggcctggagataggatctgcctcagtgtgagccacagtgctgagtgctgctgggctagcctaggttgctaaattggctctgccgagggcacagccaactgctaaatgattggaaggcccatgggacacaggctgctgggcagtgcagccctgggagtgcaggcctaggatcttccctgacactcacagtttctgccaggagcatgccgggccccaccctcttcatctaaagagcctttctttgctgcaaatgagttgtcttagtgacttctgacatgcttacccaggtgcagtggcgtgttccccagcccatctcgctggttaggatcagcaccatggtccaggagcagctgcactggaaacaggcaaacccaagaggagttgtcggaggcttccattgcctgcaccctgaacccctaacctagctagagaggctggctcagagtaggggacacggaatgcaagcatggatggctgtgttacttcattcattcactcactcactcacttacttaccagagttcatgggcaaagccctgagggccaggaactgaggatttggggagggcctcttggcctatgcaggtgtaggaatgagatttgaagggttaagtaaagttcttccaatagcagctgctcctggtgaaggctgtccagggcattttctgcttctcccacagccaagcaccatggtaggaattaagtcaataaatgatgctgagctccatggataacctctccctcctggcagtcttgggatcacctcaggggtgtgctgtattatcaccagggtctgccaatacccagaaggatgcataggcaggtagcctggatcccagacatcatacagggaggtcaggctgagcctcacaccatgtacaaaaactaattcaagagggaccatagacataagtgtgaatgctaaaacaggcttccagaagaacatgaacatcttgggcaggcaaagatttcttaaataggtcacaaaaatactaaccataggaaagaaaaggccaggcatgggagctcaggcctgttaatcccagcactttgggatgccgaggcaggtggatcatttgagctcaggagttcaagaccagcctgggcaacatggagaaaccctttctctatactaaaaacacaaaaattagctgggcatagtgatggcagacttgtagtcccagctacttgagaggctgaggtggcagggcggcttgagcccagaaggtcgaggttgcagtcagccgagatggtgccagtgcactccagcctaggcaacagagacagaccctgtctcaaaaaaaaaaaaaaaaaaaaaaaaaaaaaaagagaaaggaaagaaatattgataaattggattcattaaaattaagaacatggctgggcacggtggctcatgcctgtaatcccagcactttgggaggccaaggcagccagatcatctgaggtcaggagttcaagaccaggctgttcaacatgttgaaactgtctgtactaaaaacacaaaaattagctgggtgtggtggcatacccctgtagtctcagctacttgggaggctgaggcaggagaattgctggaacctaggaggtggaggttccagggagccaagatcatgccactgaactccagcctgggtgacagagcgagactctgtctccaaaaaataaaaaataaaataggccagggcacaggagctcacgcctgtaatcccagcactttgggaggccaaggcgggtggatcatcggaggtcaggagttcgagaccagcctgaccaacatggtgaaatcccatctctactaaaaataaaaaattaggtgggtgtggtgacacgcatctgtaatcccagctactcaggaggctgaggtgggagaatagcttgaacctggggagcagagcttgcagtgagccaagatcacaccactgcactccagcctaggcaacagagtgagactctgtctcaaataaataaataaataaataaaaataaaattaggaacttgtgttcatcaaagtataccactcagaaaatgaaacagcaagctcagaaaatcaagtcatttatatttgataaatgatttctaaccagaatatacaaagaattcttacaaatcaataagaaaaaggccaggcgcagtggctcatgcttgtaatcccaatactttgggaggccaaggtgacaggatcgcctgagcccaagagttagagaacagctgggtaacatagcaggaccacgtctctacaagatgttttaaaattagctgggcttggtggtgtgcacctgtcgtcccagctacttgggaggctgaggcaggaggattgcttgagcctaggagattgaggctgcagtgggcagtgatcaggccactgcacgtaagcctggatgacagagtgagactttgtctcaaaaaaagaaaaagacagaaaactagttttttttgtttgtttgtttgtttttgagacagagtcttgctttctctcccagtctggagtgcagtcacgcgatctcggctcactgtaagctccgcctcccggcttcacaccattctcctgcctcagcgagtagctggaactacaggcacccgccaccacacccggctaagtttttgtatatttagtagagatggggtttcaccgtgttagccaggatggtctcgatctcctgacctcatgatccacccgcctcggcctcccaaagtgctgggattacaggcgtgagataccgcgcccaggcaaaacttgtttttaaaaaaatggacaaaagaggccaggtgcggtggctcacgcctgtaatcccagcgctatgggaggccgaggcgggtggatcacctgaggtcaggagttcgagaccagcctgaccaacatggagaaacccggtctccactaaaaatacaaaattagccgggcgtagtggcgcatgcctgtaatcccagctacttgggaggatgaggcaggagaatcactttaacccgggaggcagaggttgtggttagccgagatcacgccattgcactccagcctgggcaacaaagagtgaaactctgtctcaaaaaaaaaaaaaaaaaaaaaaaaaggacaaaagatttgaacatatagttcataaaagaggatgtaaaaatggtcaataattggacacagggaggggaacatcacataccagggcctgtcggggggtgggggccaaggggagggagagcattaggacaaatacctaatgcatgaggggcttaaaacctagatgacgggttgatgggtacagaaaaccaccacggcacaggtgtacctatgtaacgaacctgcacgttctgcacatgcatcccagaacttaaagtttaaaaaaaaaaatggcccgggcatggtggctcacacctgtaatcccagcactttgggaggccgagacaggtggatctcctgaggtcaggagtttgtgactagcctggccaacatggtgaaaccctgtctctactaaaaatacaaaaattaactgggtgtgatgatgcgtgcctataatcccagctacccgggaggctgaagcaggagaattactcaaacccaggaggtggaggttgcaatgagccgagatcacgccattgcactccagcctgggcgacaggcaagactccgtctcaaaaaaaaaaaaaaaaggccaataaacacatgaagaggtgctcaacgttactggccatcagagaaatgcaaattaaaccactatgagacaccaaaagggttaagattaaagagagacaacagcaagcactggcagggacgtagggaaaggtggaactcttacactgctggtggggagtgggagtgtgtgtcagtacatcccttttgggaaaaggtttagtagtacctactaaagctaaatacatgtgtaccctagtgacccaacaatgccattcctaggtttatagaggatagatgagtgtttacagccacaaatcacatatacaagaatgttcacaacacttcattcataaagctaaaacctggaaacaccacaaatgtccgtcaatagtagaatggataaatggggtatatcacaatgaaatacaaaccagcataagaaagtactaactacagtccaccctccctaactgtgaatactgtgtccacagattcaatgaaccctggactcagaacccgaggatatggagggccaacttcaaaggacttgagcatccatggagtttggtatctgagtggggtcctggaaccaatcccaagaacactgagggaagactgtactgatataggcagtattcatgggtgaatctcatggagataactttgagtaaaagtatgcaaggctggtgcagtggctcacgcctgtaatcccagcactttgggaggccaaggcaggtggatcacgaggtcaggagttcaagaccagcctggccaacatggtgaaaccccatctctactaaaaaatacaaaaaaattaaccggtgtggccgggtgcagtctctcatgcctgtaatcccagcactttgggaagccgaggcgggtggatcacgaggtcaggagatcgagaccatactggctaatacagtgaaaccccgtctctactaaaaacatataaaaaattagccaggcatggtggcgggtgcctgtagtcccagctacttgggaggctgaggcaggagaatggcgtgaacccgggaggcagagcttacagtgaaccgagatggcaccactgcactccagcctgggcgacagagcgagactccatctcaaaaaaaaaaaagactcctataaaaagagaaaagctgtcctgctgctgtggttggcactgagtaaatgttacctgaaagtcttgaaggcctgggccctgcactctccagtggtctcttagttggagatatcccttcatcctcagtcaatcatattatctcccccaggtttaccctgccccagtctaacattgccagttccacaggctaacagagggagaagggcagggcactgcagtgccaagtcttccttatatccagaacaactgggcatcccaaggctgtgcagacagcagcgcctcccccaaggcctgtgcagagacactacttgcctagccctactccctcctccctccccaggactcaccaatctggtcattgccattgcatgaggcaaagtgtagagctgtgcggcccttgtcatcagctgcacagggatccgcgccatcttccagcagctgctgcactgacaccaccaagacagagggaggaagggggagaaagcggcgatgttagctaagctgcagacccgagcgatggagagggaggctcaggggtgcctctagacaagacatcgacaatgcataggaaagcagcccttcctagatgctggtcctatgggaacaagcaacttgttcttctgagggcacaactgaaggccatggattctgagtgctcaaactacacgtctagtgatagaacatcgtaggaggttcaaggccctcagggtcagaaattttagggtcacaggaatccctagcatagacagtggtccccctcccgtgacctcggcttggatacacatccattctggctggaaacagctgcccaagctattggcctatgctatgctcccagcaggcagcaatcccccagctacttggggcctcccaagtagcccccagctaatttttgtatttttagtagagacggggtttcaccatattggtcaggctggtctcgacctcctgaccttaggtgatccgcccacttcagcctcccaaagtgctgggattacaggcgtgagccaccacacccggcccgaaaaaatgtttatgatacacaaaaaattatgcaggctacagcatgtgtatatagcagtttgcaagccagcccataaagaaaattccagtgtataggaaagaagccttgaaggatattcatcaaaatattaacagattagttcctttgcggacatggattttttcttatatatttctctaatttccacaacatttttaaaaaatttttttcttatgttatttatttatttgagacagaatttcgctctgtcgcgcaggctagagtgcagtggcgtcatctccgctcactgcaagctctgtctcccaggttcacaccattctcctgccgcagcctcccaagtagctggcactacaggcgcccaccaccacgtccggctaattttttgtattttcagtagagatggggtttcacagtgttagccaggatggtctcgatctcctaacctcgtgatctgcccagctcggcctcccaaagtgctgggattacaggcgtgagccaccgcgcccagctaacatttactttttgtagagacgaggtctccctatgttgtccaggctggtctcaaactcctgagcccaagtgatcctcttgccttagcctcccaaagtgctgggattacaggcatgagccacctcacctggccgtggcagctaagttgagtattcactcccattaaccacaagttccaaagttagtgcctactctttgcagaagactgtgctggctgccagggatacaaaagtatacatggtctccaccatcaaggagtccacagggtggtaaatgctatgacatcaggaagttcaaagtgacaggggagcatggggagagtgagtgtctaagccagacttaccttcagcaagatgactgcacagtcagacaataaatacagtgagcctgctccaagggcgtgagtttgcagactgccttcccacatattgattacctggccttttccttccccaaccagcccatgggaccctgtagctggacctactgtgcacactcacctgtttccacatcattggcattggccgagtccctcagtctcttcagagctgtaaagagagtaacggatgccagtttaaaaaaacagccatggctgggtgcggtggctcatgcctataatcccagcactctgggaggccaaggcaggcagatcacaaggtcaggagatcgagaccatcctggctaacatggtgaaaccccatctctactaaaaatacaaaaaaattagccgggcgtggtggcaggtgcctgtagtcccagctactcgggaggctgaggcgggtgaatggcgtgaacctgggaggtggagcttgcagtgagcagagatcgcgccactgcactccagcctgggtgacagagtgagactccgtctcaaaacaaacaaacaaacaaacacacacaaaaaaaacacagccattggctgggcatgatggctcacgtctgtaatcccagcactttgggaggccgaggcaggtggatcacttgaggccaggagttcaaaaccagcctggacaacatggtgaaaccccatctctactaaaaatacaaaaaaattagccgggtgtggtgcacatgcctgtaatcccagctactctggaggctgaggtaggagaatcacttgaacccaggacatggaggttgcagtaagccaaaatcgcgccactgcactccagcctgggtgacagagtgagacgctgtctcagaaaaaaacaaaaacaacaaaaaccaacaaaaaaaacccagccatctagctgggtgtggtggtgtgcacgtgtaacaccagctacttaggaggccgaggtaggagaatgggttgaagccggaaggcggaggctacagtgagatgagatcacgccactgcattccagcctgggcaacaaagtgagactgtctcaggaaaaaaaaaaaaaaaaaaagccacaatggctgggcgcagtggctcatgcctataatcccggtactttgggaggccaaggcaggtggatcacttgaggccaggagttcaagaccagcctggccaacatgctgaaaccccatctctactaaaaatacaaaactagccatacgtggtgactcacgcctgtaatcccagaacgttggaaagctgaggtgggcagattgcctgtgctctggagtttgaaaccaccctgggcaacatggtgaaaccttgtctatactaaaatacaaaaaattagttgggcatgggggtgcacgcctacaatcccagctacttgggaggctcaggcaggagaatcgcttaagcccaggaggcagaggttgcagtgagccaagactgtgccactgtactccagctcgggcaacagagtgagactctgtctcacacaaacacacacacacacacacacacacacaaaaaacataggccgggcacagtggctcacgcctgtaatcccaacactttgagaggccaaggtgggtggatcacgaggtcaggagtttgagaccagcctggccaataaggtgaaatcccttctctactaaaaatacaaaaattagccaggcatggtggtgcatgcctgttatcccaactactcaggaggctaaggcaggagaatcacttgaacttgagagccggaggttgcagtgagccaagatcgcgccactgcactccagcctgggcaatagagcaagactctgtctcaaaataaataaataaataaataaataaataaataaataaataaataaataaaataaaaacacaaaaattagccgggtgtggtggtgcatgcctgtaatcccagctacttgggaggctgagacacgagaatcacttgagcccaaaatcacaccatggcactccagcctgggtggcagagcaacactccatctcaaaaaaaaagaaagaaaaaatatttctcaatcttaggttaagttctaacttaaatcaatctaacatggtaaaaccccatctctactaaaaatacaaaaactagctgggtgtggtggtgcgggcctgtagtcccagctacttgggaggctgaggcagtgagccgagattgcaccacctgcactgcagcctgggtggtaaagcgagactctcgtctcaaaaaaagaaaagaaagacagtgccctgggaacaaggagaaacttgaaatgaggcggagctagtacaaaggccacatcctcctgcaaatcctccaagacttttggagccagatttcctctctatcacttgtagtcacagggtgaccttgagcaagctagttaacccagctgggcctcaggtctatcatctgcaaaacaaggctgagttgttctgccagccccgagttattgcaaatgatttacacagaagctctttgtgagctggttacacagataatcttatattctccttcaaagcaggtcgttcccaaatgatttgcctaaatttggtatttcctaagcagattttccccctccaatggctaatggaaagcaatgtctttgtcatcggagatatggtcaaaaattgcaattcagatacatgacaattccttgctttcatacagcactttatggtcaatacaacgcttccaaattcttatttcatcttcgtgacatcactaaaatatggctagagtcatagccagtcctggaagaaatccccaaagtccccattcttaatctctcagtgcctgggtttccatgtcacccatgcattgtagaagacaatatggtagatataccagaggagaagtttgagtcgggctgacccggattctaataccagcaacagccacttgctatgtgacctggaataagacaatttctctgagcctcagtttcctcttcagtaaagtgggaacaatttctatgtctcaaagagttcttgtgaggacagatgatcatgtatcagcagtgtttggggcacagcaaaggcagcataacagctaaacatccattaccttacttaactcatcccattttacagatgagaaaactagggctgaggccgggccagtggctcatgcctgttatgccagtactttgggaggccgaggtgggtggatcacctgagatcagaagttcgagaccagcctggcaaacatggtgaaaccccatctttactaaaattacaataattagccgggcttggtagtgggcgcctgtaaccccagctactcgggaggctgaggcaggagaatcgcttgaacccggggggcggaggttgcagtgaaccaagatggcgccactgcactccagcctgggcaacagagcgagactccgtctccaaaaagataataataataaataaataaaaataaaaaaatttaaaaagaaaactaaggttgaaagggtctatcatttgccctaaggtctaactgtggtaaaggagtccaagtccgtgcatttaaacaagctggtacgacttggctgcaggctctggcctcccctctccatgataataaaagtgttccccagtacctcattttattattcaccaataagcgttccgagtcatgggaagtttccattcagaaattacccagtgagagaagactggggtgactggctcagagcaggaagactttctaaaaaaaccatcatcaccatcgttactgaaaggagactcaagggtcagtgtggccctcagcgcagacgtcgggggaccccggctgagggtcgggggcgaccaaagcgcggccactggtcctctgaggccccgcccctcgcccgggctgccccgccccgggcccccgcgccgctcgcgccgctcaccgtgcacctccttgcccgtgggcccgagccgccggtggggcctggcagcgcgcctcagccggccagcgggtatcttgcagcgcagctcgtcgcgcggctccgcatcctgctgccacaggacgtgcaagtagcgcagcggcgactgggccccgccggacgcccggcccgagaggcccgcgccgccgccgcccagcgcagacccgaagtcagcgaaggagaagaggccctcagcgtcagtcagcggctccggcgccaccgcgcactcgccctccgagctcgagtggcctgagcgcggctcgtcgtccgcgtccccggcggcggctgccatggcaacggctccgcgcgggcctggccgcctgagcctcgttcccgaccgaccaacggacctacttccctccgccctgagtcgtgctgtcagcgagctggcgggcgggcagggcccgcaaccacggcaaccgagcgggggcgggctcaggccgagacagagcggcgaaccaatgactacccttccagcttaaaccggtcccaaaaccaatcggaaagggagggcacagtacaagcaggataattggacagggtttccggcaacgtgactgacagacattgtaaccaattacaaacttgaagtgaccttggctttcgctgtacgtcgctaccggagccagtaaaacagcatttcagacgctttttttttgcgacggagtctcgctctgccgccaggctcgcgatctcggctcactgcaacctccgcctccttgaagcaattctcctgcctcagcctcccgagtagctgggactacaggcgcgcgccaccacgcccagctaatttttgtatttttagtagagacggggtttcaccatgttggccaggatggtctcgatctcttgatctcgagatgtgccggcctcggcctcccaaagtgctgggattacaggcgtgagccaccgcgcccggcctttttttttctttttcctctccatttcccagtctaatgagaaaacaagcagataccttagcaaatcagattaagatgatttgcaggcactcacaaaggaaaatgaagaagccacgccatccatgtagatatagatgttgtaaatcaatgaacgcaaaaaaaaaaaaaaaaaagaacttcccacaaatgcataatgtacgtgggaaagggaaaatgtgttgaaatttggagataccactacaaactgtgagtaatagtgtctaaatgcaatggatttcctttagtcagagttctctaggtaaccccgacgtagatgactgatctacaaagatttgtaatacaaagtgattacattagagcaatagtttagttcgacagccagtcactgagccaggtaactgctaggtcctggacacaggatcagacttggtgcccctgagatgctcacaatccaatgggagaagaccaggaaacaaataagtgttcctcaagcaacatttcatgggtgcacgttttcataaaacttctcacaatcccgtaccccacaagcacttctataaagtagacaagaaggaccatccctattttataggtgaggagttgaaaagcagagggaagagactcattcacagttgcccagctctcaccggaccaggtcttgtgtcctggcaaaagttctttccatatataaaccctcccactcaacccagttaaaatgtaatctttccgcacggtgggtcacgcctgtaatcccagcactttgggaggccaaaatgggcagatgacaaggtcgggagttcaagacaagcctggccaacatgatgaaacctcgtttctactaaaaatacaaaaattagctgggtgtggtggcgcacgcctgtaatcccagctattcaggacactgaggcaggagagtagcttgaacctgggaggcagaggttgcggtgagctgagatcgcaccatggcactccagcctgggtgacagagcgagactccatctcagaaagaaacaaaaacaaaaaaaaggcctggcgctgtggctcacgcctgtaatcccagcattttgggaggctgaggcaggcagatcacgaggtcaggagattgagaccattctggctaacatggtgaaaccccgtctctactaaaaatacaaaaaaattagcctggtgtggtggtgggcacctttagtcccagctactcaggaggctgaggcaggagaatggcgtgaacccaggaggcagagcttgcggtgagccgagatcgcaccactgcactccagtctgggcgacagagaaagactccatctcaaaaagaaaaaaaaaagtaatctttctcttacaattggaaaagcacttccagaattttcagtgtttgcagtcgccattgtgaggtttatcattgtactatatggaaaaaaatgctatgtttatttgtactctcctcgtctgccccataatggatacagtgctgagacaggatctctcactgtcactcaggctggagtgcagtggtgtgatcacagctcactgcactcaagctttcctcccacctcagcctcctgagtagctggggccacagatgtgtaccaccgtgcctggctaattatttttttgattttttgtagacatggtctcacttttttgttcaggctggtcttgaactcctcgcctcaagggatcctcctgcctccacatcccaaaatgctgagattacaggagtgagccacagtgcctgggccccaatttttttttaagatggggtctcactatattgcccaggctgatcttgagctcctgagctcaagtgatcctcccaccttggcctcccaaagtgctggcatgagccaccacatccagccccatgaaaatcttctgacttcacaactccttctcaaatgtcatgaacattttgagaattgttgtcaaattggagcaacctgtatcaaattcctgtcatatatggactataagatttcaggtaatttcttttcttttttttttttttgagacggagtctcgctctgtcgcccaggctggagtgcagtggcaggatctcggctcactgcaagctccgcctcccgggttcacgccattctcctgcctcagcctcccaagtagctgggactacaggcgcccgccactacgcccggctaattttttgtatttttagtagagacggggtttcaccattttagccgggatggtctcgatctcctgacctcatgatccacccgcctcggcctcccaaagtgctgggattacaggcgtgagccaccgcgcccggccaatttcttttcttttttctttttttttttgaggcagttttgctcttgttgcccaggctggagtgcagtggtgcaatcttggctcaccacaacctccgcctcctaggttcaagtgattctcctgcctcagcctcccgagtagctgggactacaggcatatgccaccatgcccggctaattttatatttttagtagagacggggtttcactatgttggccaggctggtctcgaactcctgacctcaggtgatccatctgccttggcctcccaaagtgctgggattacaggtgtgaaccactgtgccaggcctcggagaagggttattatttaaactagaaactaaatgtctcccaaagttagctcggttcgagccaggaatgattaagggcagtctgaagattaaatggaagatgagggttggttagatcagatctctttcactgtcattattttctcactgttacaatttttgcaaaggtggtttcagcaataaaaatatttcacaaattttacaaaagcaaaggaccatgaggacattgttggggaccctccctgaaccaaggaagagactgtgactcttccttggttcagggaaggtcctgaaccaaatcgagggtcggtaaagcttaagctccattatttccaaatttgtgtcacctctggtgacagcacaaggaagaaacacaaaacaagaacgcagcatagggagttggggctgggcattgcaattctcaataggatgttgagtggatggcatcagagcagacacctgaaggtgccatgcagataccgatggggaagggaatgggagtgggggtgccactgcattcgattctagacttggataacagtgagtgcaaaatcccagaggtggagcgtgcctcagtgggaaaagcaaggagggcggcgtgacaaagggacccagagagtcctggtcacacagcaaatcagtggcggagtagggactggaactcggatttccactaggtgttgtgtatgggcagatggctaaactaaggcctctccttgactcatacaccggtttttattggtttgctttataaccccatctctaccttgagggtttcccctggcctcgaacccggtgtactcaagagctgcccatgtcccaggcttcgcgacacagctggcctcatctttgcctgctccaactttaatgtccaaagttgggtggctcctgttctccattccctcttactgcatgggaccaaatctcaatttttttttttctttttttttttagacggagtcttgctctgtcgcccaggctggagtgcagtggcgcgatctcggctcactacagcctctgcctctcaggttccaccgattctcctgcttcagcctcctgagtagctgggattacaggcggacgctaccactcccggctaatttttgtatttttaatagagacggggtttcgccatttcggccaggctggtctcgaactcctgatctcagatcatccacccgcctcggcctcccaaagtgtagggattacaggcgtgagccatcgcgcccggccaaatctcaatttttatccccagtaagtttagtcttgtgaagtccgaacgtttgaataatttactcgctgcaggcaaaccgcctacaactaaatccatcaggcccccgtatccgaatcttccttcacgcgagaagccggccatcttttgtgtagcattctttctggttcctctaactttgcctctcctttacgccaaatacgtgtccttatatctgaatctacaccactattatagattcaccttctttgagaagtccctatttgaagagaggaaaattcaggctacttgtaaccctcttattctttttagacggagttttccctcttgttgcccaggctagagtgcaatggcgcgatctcggctcaccgcaacctccgcctcccgggttcaagcgactctcctgcctcagcctcccgagtagctggaattacaggcatgcgccaccactcccggctaattttgtatttttagtagagacggggtttctccatattggtcaggctggtctcaaacccccggcctcagcctcaggtgatccgcccgcctcggcctcccaaactggtggggttacaggtgtgagccacggaacgcggctcctcttccttctggatatggctgtctcagatggccagaggcctcggaaaggcttccggtttcccggcaggcccgagtggggctgaacttccggcctcaggacgcaggcgcgggccgctcatttcgctctttccggcggtgctcgcaagcgaggcagccatgtcttatcccgctgatgattatgagtctgaggtaaggtggccgtaagggcgcggtgggctccacgacggggtgatctctgggaccactggatgtgggtcccggcgcgaggcagcttccgggtcgcggccagctccggccgacctcccgcccggccctcaggctgctcccacagttcccggtccctagacaaccctggctctgcccgcccacttcgcgtgttcgattggcttgtccttcccctttctaagaccggagactaaggcctgttagacgtttctgtgtttctgcacctgagtttttttggtctaggctccgtctggtcaaatctcgctgattcccacagcctcttgtcctttgctccacctcattgcacccgtaatgttgtattgtcattgtctgtttactgtcccttttctctaaggcgtgtgagttcctcaaaggcaggcacagtgtcttattcgcctctgtatccttagctctctgcttggcatctagactctaggatgagcgttttgaattcacgacttggcggctgtccttgactgtgtctctttccttctaggcggcttatgacccctacgcttatcccagcgactatgatatgcacacaggtgagaccacgggttaggctggctgagtactcgtagggatcagttcctttggaatgtcttagaaccagctctgacaggcatcaaaaattgctctttgatggtccaggtttggagtcagtcattagctgccagtgcgaggggttttataaagcctaataaaccaggctttttatcatagtccacctcagtcttggaagagaaggattacttacctggctatggttttcttgtgtaaactattagccaaataagaaaagcttttttgtttttgtttttgtttttgtttttgagatggagtttccctctgtcccccaggctggagtgcagtggtgcgatctcggctcactgcaacctccgcgtccctcgttcaagcagtagttctcttgtctcagcctcctgagtagctgggattacaggcgcccaccaccattcccagctaatttttaaatttttttaatagagacgaggtttcgccgtgttgtccaggctggtcttgaactcctgacctcaggtgatccacccgccccaacctcccaaagtgctgggattacaggcgtgagccaccgcgcctgccccaaggaagaaaatcttgatgtgaaaaatttaagtaattcaaaccaagcccgaatgaaatctttttaggaggtgtctgaggtttcctgaaacgttatagtgacttgacttagtagtcagtgttatccattgttctaagtactttgtatgaaatattttgtttaatccttacagcagttctgtatgttaatgtctcctaaagaatagaaaatatagcagagaggtttattagtagtaacttggcacagtcatatatttaaaaggtgacagttattcattcaagaaatattaagtacctgttaccacttactttccaacagtcttgcctctctcccctccaacgcacacttttctaggccctgagggtatgtctgagtacaagacagacgagattcctgacttcctagacttgggagaagggtgcaaaacagataataagtgaaaaataactttaagtcatggtaatatttttgaagaaacagggacaacgagattgggagtgacttgagatgtttgtatctctgagtattcaaaagggaattttacgcagacctgagtttagtttctggggtggtcttgccatttcgttctatcatatatgtgggtttgagcatactctgtatttgttgtatccaacctccaggagatccaaagcaggaccttgcttatgaacgtcagtatgaacagcaaacctatcaggtgatccctgaggtgatcaaaaacttcatccagtatttccacaaaactgtctcagatttgattgaccagaaagtgtatgagctacaggccagtcgtgtctccagtgatgtcattgaccagaaggtgtatgagatccaggacatctatgagaacaggtatgggctactggctgaaagggcctctttctgggtgggactggcctggtaatatagttcctacaaatgaggtgagcactctgtaaacagtactttcgggggggttggggggtgggggtctttgtgagtccttgaggctagggacattttattttgttagactttattttatttatgcatttgtttattttttgaaacggagtgtcactctgtcgcccaggctggagtgcagtggcaagatctcggctcactgcaacctccgcctcctgggttcaagtgattctccagcctcagcttcccgagtagctgggactacaggcatgtgccaccatgcctagttaatttttttgtatttttagtagagacagaatttcaccatgttggccaggcgtgtgttgaacccctgacctcaagtgatccacccgcctcagcctcccaaagcactgggattacaggtgggagccaccatgcctggcctaatttttgtatttttagtagagacggggtttcatcatgttggccaggctggtcttgaacttctgacctcaagtgatgtacccccgttggcctcccagagtgctaggattacaagcgtgagccaccatgcccggcctgttggactttatatcctcagaaatttatacaaagcctaaaataatatcactattaacaattataataataatgattagcatttgtttttattaccaggatagatccatcaatgttcagtgtgttgtttgtgtttttactcatttacccttcacagtaagcccatgaagtagcagtttttctcattttacagatgaggaaacagcacagaaataagtcatgtagctagtttaatggatgtgctgagatttgaacctgcagtgtctggcaccaaagcctaatttctaaactgtgctatgcagcccttcagtacatatcagagcaagctgaactccgcaggttttgaggggctgccgttgtgtaatgagcgttagagataagataggtcagtcaaagctgggatagtcaggagtgacttcaccaaggaaatagaatttaagcaagtcagaaggatgagggagagaaaacaaatagccaaaggcctattgatcaatgaataggatctctgacatgtgttttctttttttgttgttttgaaagagctgattgtagttgaaaagcagaggaaacctcagacattgcatggttttaggcctcacccctgccactctcgtgagcctaagttctacttggtgtggactccaaggtccttcccgcccctgcaagccacccattaggttgagctgagagatcagccaatgggaacagagtcacttatgaccaagaagaattgatctgggggttagttagtgaggagagagaaagggagaaaaccttgttcggaggttgaacacctccagccgaagaaggtgcagcatcgaggtctttcaccactagcaaatggatccaagtcatgcggcaccaaaagaggttagcagctgaagggtgttgaagtgacacaacaccaaaacatgctaccaatgatgaatccgtatctgtacaggtctccagcagcctcagttcttgcctcctcaaaagaaagaattcgactgaggggtaaaatgctaccgatgatgagtccgtatctgtacaggtctacagcagcctcagttcttgcctcctcacaagaaagaattacactgagggctaaaatgctactgatgatgagtctgtatctgtacgggtcgacagcatcctcagttcttgactcctaacaagaaagaattcgactgaggggcacaaggcagaagaagagagggaggcaagtttgagagcaggagtgaaagtttattaaaaagctttagaacaggaatgaaagaaaggaaaggacagttggaagagggccaggtgggtgacctgaaaggcaagtgtgctgaactgtgttttctttattccccgggtcttttctgattagaagtatataaatcagcgcctacaaaaattagctggggcatggtggcagcatgcctatagtcccagctagttgggaggctgaggtgggaggatcacttgagcctgggaggttgaggctgcagtgagctgcacaatggagcgagaccctctctcaaaattaaaaaatggacctgatgttcaatagaaatgtagctagacattaattttaatttttcagccaagcgaagtggagatttatttaaaatattatttctatatgtaatcagtatttaaaaattaaggggatatttgcccttttttttctttatacttaaagtttcctaaatccagtgtgtatcagaaatacttgctttgtgtttagattttatagagtttatgactggaaaagtaattcaaatttgaaatttgaatcttcaaatagtagagtaattccaaatagacctaaaagttttccaatactgagttaagtgttggtttttaaacttaaatggcaactaactgaaatttaaaatttaactctttgcttatatagtagccacatgtagctagtggctattgcattgggcagtgcccgcagatacagatgacagttgaagccaagcatcttgtaagtctttctctaggagaatgtgagaagaaatgctggtgccttaagaagtatgtttctttagggatgggtgggcaggcaaagaaaggatctagtaaaggaggcagaaagaaaagtgaaaagtagatagtaaattggcaaagaaatgtcacaggaaccaaaaagtctgcagaagaaactgaggaagagagtatcaccaaatgttttagtgaggtccagatgagaaaaaaagccagttgaatttggtaacttggagggccttgataaccttagcaaggtcaatgtcagtagagtgatggaagcaacagccagagagcagtggggtgagaaaggggaattggtaagtatcggggacataaagggtcactgagtggctttgtgttttgtttctgtgttttttctgtttttgttttttgttttttgagacaggatttcgctcttgttgcccaggctagagtgcaatggcgcaatctcagctcatcgcaacctccgcctcctggctccaagcgattctcctgcctcagcttcccaagtagttgggattataggtgtgcaccaccatgcctggctaattttgtatttttagtggagacggggtttcaccgtgttggtcaggctggtctggaactcctaacctcaagtgatccacccgcctcagcctcccaaagtgttgagattacgggtgtgagccagcgcgcctggcctgtttcagtgtttcttttctgttctgtttctgtgtttctccccaacccccatcccgtagagacagggccttcctatattgtccaggcttgtcttgaattcctgggttcaagcgatacccctatcttgtcctcccaaagtgttgagattacaggcgtgagccatcatgcctggcctgttcagtgttttttaggggaacttgagcatgtttatatgttggactaaaagagccagagaagcaggaggggtggggcttgaggagattggaggaaagtattaatagctgctgagggcatcaggagaagaaaattaaacaacctgttgcaggtttgtcaagtagcagtgtttggattggataggcagcagtgtttaaattggatgctgtaggtctgttgtggccttggactgcagcagactgatttgcttctgtgtttagagacgtttggatgtgctccaggagatggaaacgctgtgttaaagaatggtggccaaaaaagtagttcttatagcagaaaacagcaagcagttaaatatggctatagttaatgatacagaggcaggagattatcctgaaaagcttgatgggtccctaactgatacaaaaacaatattttcttgtgttgagaaagattgaagtgtggagttgggttgaggacagttgtgggcttgaagggctttggcctcagctctgtttatttgacatcttcccctttctaagcctgggtcctcatctgtaaaatgttaggattggcattctccagtccttttggaattttagagatttttttcttgatttttagctggaccaagctgactgaaagattcttcaagaatacaccttggcccgaggctgaagccattgctccacaggttggcaatggtaggtgtgagctctttatatcttgtgcactgagtggaatccagtggctgagtcattagacaggaagctcaagagggtctgtgtctgttttgctcaccattttgtttccttggtgcttggtatgtagtaggtccttggcaaaataacttgtcgaaggctggatgatttaagagaggacagagatctctcatatatggtgaaatttagatctttgtactgacttgtttctatttccttctataatttgggggtcattacagtcactctggaataagctctctagcttcccacctttgactttcttagatgatgtcctttatatatgggtgaggtaggcaaatccaacttcattattttgcttgtggatattcagctaccctggcaccaatttatttatttatttattttattttattattattattttttttgagatggagtctcgttctgtctcccaggctgaagtacagtggcacaatcttggctcactgcaacctccgcctcccaggttcaagcgattctcctaggttcaagcaattctcctacctcagcctcccgcgtagctgggattacaggcgcccgccaccacgcccagctaatttttgtatttttagtagagacggggtttcaccgtgttggccaggctggtctcgaactgctgacgtcaggtgattcgcccacctcagcctcccaaagtgctaggattataggcatgagccaccgcacccagcctgcccagctaatttttaaaaattttttgtagataccgggtcacactttgttgacctggctgatcttgaactcctgacctcaagtgatcttcccagagtgctgagattacaggcatgcaccactgtgcccagccacattgtcttgattactatatttttgtagtaagttttgaaatggggaattgtaggccgggcgcagtggctcacgcctgtaatccaagcactttgggaggccgaggcgggtggatcacctgaggtcgggagttcgagaccagcctgattaacgtggagaaaccccatctctactaaaaatacaaaatcagccgggcatggtgacacatgcctgtaatcccagctacttgggaggtggaggcaggagaatcacttgaacccggaaggcagaggttgcggtgagccgagatcgcgccattgcactccagcctgggcaacaagagcgaaactccgcctcaaaaaaaaaaaaagaaagaaagaaattgggaattggtaagtcctccaactttgttctttttttttttttccccaagattgttttgactattctgggtctcttggatttgcttattgattttaggatggacttgtcaatttctgcaaagtagccagctgggattttgagaggaattgcctagaatctgaagatcactttggggagtattgccgtcttaacagtattaagtcctccaggccaggcgcggtggctcatgcctgtaatcccagcactttgggaggtgaaggtggacggatcacgaggtcaggagatcgagaccatcctggctaacacggtgaaaccccgtctctactaaaaatgcaaaaaagttatctgggcaggccggcatggtggcgggcacctgtagtcccagctactcgggaggctgagacaggagaatggcgtgaacccgggaggcagaacttgcagtgagctgagattgcgccactggactccagcctgggcgacagagcaagactgcgtcccaaaaaaaaaaaaaaaaaaaaaaaccaatattaagtcctccaatctatggacatgggatgtctttgatttatttaggtctttggttgcgttcaccagtgttttgtgttttcagtgtacaagtctctcatttgttttgttatagctaacgtttttttgaacacttaactccttttttttttccccctaagatggagtcacggagtcttgctgtcttgcccaggctggagtgcagtggcgcgatctctgctcgctgcaacctctgcctcctgggctcaagcaattctcctgcctcagcctcccgagtagctgggattacaggcacctggcggattttttgtatttttagtagagatggtgtttcaccatcttggccaggctgattttgaactcctgacctcaaatgatccacccgcctcagcctcccaaagtgctgggattacaggcatgagccactgcacctggcctgaacatttactctcaattgactaaacacagaatgagttcaaaactcattctgtggctgggtgtcgtagctcacggctgtaattctggtactttgggaagctgaggtgggaggatttcttgaggctgggagatttagactagcctgagcaacatagggagacccccttctctacaaaaaattttttaaaaaaattatccaggcatggtggcacatgcctgtagtcccacctactcgggaggctgaggtggaaggatcacttgagccctggaagtcgaggctgcagtgagccatgatcatatcactgcactccaaccttggcaacagagcgagaccctgtcttcaaacaaacaaacaacattctgaaattaatattttctttcttcctttttttttttttttttttttttttgacatgggggtctcactgtgttgcccatgctggagtgtagtgtgataatggctgactgcaacctgtgcctgctgggctcaagcgatcctcccaccttagcctgccgagtagctgggaccatgggtgcgcaccaccacgcttgtctaattactcttgtgtgctggtttttttatgcacttggatggcagaagtctctaaatggtgaaaggaaatagatctgaatgagatcttaatctcatcgacagagattgaggttgatggagtcaaatgagaagtggattttctcattgcatgtattcttggggcatatgcatagcaatttagatgttgtttagtcttcagaattacctttattcctccccaccaaagagctaaagctgccaggataccccagttttatggttagtgaagcacccttctgccatctctttcagatgctgtcttcctgattttatacaaagaattatactacaggcacatatatgccaaagtcagtgtaagtatttaagtgtcgcagttttttttttgtttttgtttttttaactctgtgctgtttttgtccctagaacacagtcatttgtttatattggttcagtgtctgggcatgattggcatgtttttgagttttaagaagcggtggaaggaacagtttaacccagaaagctgttcagacacactaacgctatataacctatgcattcttttaaatttctctgtccccacaattctcctggactgggcaatcacccatgcactggttataggctgccagcctcataggatatttccaggtacctgctgctgcttctgcttggggttctttttcccttcagagcattgagcctctgtttctctgagatgtacataacactgtcactgtatgccaagcacaatgctaggcacttagcacacatcttcacatatctaattctactatcaatcgtgcaaagttggtacccgaggtgccaagaggttaccttttctcaaatttatccagctagtaagtgacaaaactccttgaatctagaccagcttgttataacaccagtattctacacattatcccaactttgagcacttgctagattctgttcttcccgacttctaaattatagagtacgtgaagtttctttttttttttttttttttttgagagagagtgagtctcgctctgtcgcccaggctggagtacagtggcgcgatctcagctcactgcaggctccacctcccaggttcacgccattctcctgcctcagcctcctgagtagctgggattgcaggtgcctgccaccacacctggctaatttttttgtatttttagtagagacggggtttcactgtgttagccaggatggtctccatctcctgacctcgtgttccgcccgccttggcctcccaaagtgctgggatgacaggcgtgagccaccacgcccggcctagagtgcctaaagtttcttaaaatgccatctgtactatttaaggctgggcgcggtggctcacgcctataatcccagcactttgggaggctaagggcaggtcacctgaggtcaggaatttgagaccagcctggccaacatggagaaacctcgtctctattaaaaatatgaaactacaaaaataagctgggcgtggtggcgggtgcctgtaatcccagctacttggaaggctgaggcaggagaatcgcttgaacccgggaagcggaggttgcagtgagccgagatcgtaccactgcactccagcctgggtgacagagtgagactcttgtctcaaaaagaaaagaaaaatgccatctgtattatttatatacaccaatgacttaatctctatctttagcctcagttgccccactgaagtccagacttgtatattcagctgtcagcatctgcacttggctgtctgagtcatctgaagcttaacacatctaaaactgaattcttattttccctctaaactagtttttctcatggtaatcatctcaataaatgctaccgtttattaccaagttaattggactaaaagccttggcattattcttgacttttctctgacatgatatccagcaaatcctgttaagctctgtcttcaacatacttctttttgttgttttgttttattttgttttgtttttgagacggagtctcgctctgtcatccaggctggaatgcagtggcgccgtctcggctcactccaacctctgtctcctgggctcaagcaattctccaggctcaaacgattctccttcctcagcctcctgagtagctgggattacaggcatgcaccaccacgcctggctaatttttgtatttttagtagagacagggtttcgctatgttgcccaggctggtctcgaactcctgacctcaggtaatccgcccgcctcggcttcccaaagtgctaagattacaggcgtgagccactgtgcctggccttcagcatacttcttgaatcagccacttttcactgccacactgctgctcacctagttgaagtcattatcatctcttccctgaattactgcaggagctgcttacctggtgtcagtttccactcttggctgtttattctcaacataataaccagcatgatccttttgctacatagtttcatcaggtcacttccaatcctaccatgacttcccatcacacttactaattccaggttttagccctgtttcccttctcactcatttcctgaaactttccccctccctccctgggctcctggcaatattcgtggcacttcagagcacttatctcttgtacgttgtatttgtttatttaggggagggagtttcttaatctactggaaggttaactccaccggggtatgtgcttgtcttgttcaccaatataatccagtgcctagaataatgtctggtcataatggtgttaattgagcatgtgtgtgcttgcatgcatgtgtaagtgaaggaaattggcaccaagatctccacctaaggaggtcctagtttctcacagttactcacccctcttctccttgaggaccgcttgatatggctagaactcctgccttggccacaggagccactgtcagtagtggtaggtggaaaagttcttgctgccagagtaaggggccatgtttttccggcatcccagcgggatctctgactactttatctgatagaaagtaaagattcctggccaggcgctgtggcttacgcctgtaatcccagaactttgagaggctaaggcgggtggatcacgaggtcaggagttcgagaccagcctgaccaatatggtgaaaccccgtctctactaaaaatacaaaaattagccaggcgtggtggcgtgtgcctgtaatcccagctactcgggaggctgagacggaagaatcacttgaccccaggaggcagaggttgcagtgagctgagattgcaccgctgcactccagcctaggcaccagagcgagactccgtctcaaaaaaaaaaaaaagtaaagattccctactaccattgatgctaaagttcaggtactttgtggatatgctaagaatctagccattatgtgtacactgcttttttgggaacaccatgacaccatagcccatagtatagctggttttaccacctctaatctctctgtttggtctgtagatgaagattcagcagaagcttattgatgctgttatctttttattagctaccaggactcctacataaatgaccagttttaagcccttgggaagcagtttttcattgaatgtgcttagattgtgcttaatgtattaagcaccttacataacttttattaaacagagacggggtcttgccatgttgcccagcctgttctcaaactcctggcctcaggtgatcagcccacttcagcctcccagagtgttgagattacaggcgtgagccactgcgcccagctatataatcttacttcattgtgactagtcaacaatcttttgcccacattttacagagattaaataccttgtgagaaccccacagttaataagaggtgggactgactccaaagttgtgtttcttctccatcacaaatacattgctcatggtatggttccccagctcagaaactatcagtggttctcagatgcaagcaacataaagaccagaccaggggtcagccaccttctctgtggagggtcagataataagtattttagtctcgagggccatgatggtttctgtcagatctgttcagctatgtctttgtggcagttatcaacaatatgtaatgagtgggcatggctgtgttccagtaaaacttctttatttacaaaacaggtggcggaatagatttgcaggccccctgacctagatgcttgtttggcgttggaagactgcaacattcctggcccgtagtctagtgatgcccggtgcagcattatcttctcttaactccctagccttcaagtgccacgatttaacttcttcgcctttgctagtgtggtttttttctgaaacacttttccttctctctgctttgccagatcatcatccctgctctgagggtcatttaaggtctgttgctgtagaacctaaccacgtgttgcagtattcagtgcgtcagctgctataggactttctatcttccctctcacttgcatatttacatagtaagaaagagaggacagataccaattctcttgtatttgttcacagctgtcacagtataccatgggtaaaacacattaaaattaaatatctgtatcttgatatctcttgttttctttacaggggggaccttccttggagcagaggtttgaatcctattacaactactgcaatctcttcaactacattcttagtgagtctgagatttggccaagagggtgtgtgtggttatgatgaggttcagcattggcctccagcttttttttttttttttttaaattagcaggatcttaatgtgtaggtgggaagaggggaggtcttgtgattcatggtccttttaagagagaaattacaaagcattctgcagcctacagaatgggcagagtcattgctttgaatctgacttttctgtgatctcctgcacagatgccgatggtcctgctccccttgaactacccaaccagtggctctgggatattatcgatgagttcatctaccaggtatctggtcagcttcagcctaatttgaaataactggtccatgccaggaatagctgttactattgtttgtgtaaaaaagctgcagggtgtaaaaatatccccattgtagtgtaaaataccccatggcagtagactccagtttcagctggctttcggaagaggcagggaagcctaagcactccagataggaagctggaagtcggataagttcagctcctgaccttcatcaagctcttactagaccttgttaggtggtctggtggtaagaacacaggcttcacaggctttggagcgaggtggaagtggattctaacttgggtgctgccacctgctggtagctctgtaacagtgatgtgctatttaaactcagagcctcactttctttacccacacaatggaaatgttctattatctttttttttttaagagtcagggtcaggccgggcgcggtgactcacgcctgtaatcctagcactttgggaggcagaggcgggcagatcacgaggtcaggagatcaagaccatcctggctaacacggtgaaaccccgtctctactgaaagtacaaaaaattagccgggcgtggtggcaggcgcctgtagtcccagctactcagtaggctgaggcaggagaatggcgtgaacctaggaggcggagcttgcagtgagccaagatcgtgccactgcactccagcctggtaacagtgcaagactccatctcaaaaaaaaaaaagaaagagtcagggtctcactctgttgctcaggctagagtgcagtgataatagcttactgcagcctagaactcctgggttcaagtgattttcccacctcagccacctgagtagctgccactacaaggcccacaccaacttacgtggatatttatattactgtagagacgagggtcttgctgtgttgcccatgctggtgttgaactcctggcctcaagtgagcctcttgacttggcctcccaaagtgagccaccatgcctagccatctatatcttgattgtggtggtggttacttaagtgtatgctcgatcagaatacaatagaacattttcatcacaacaagaatatcacctacctcaggagttgctgttcaaggtcgaatgagaactgtgccaaatgcaaataaagtacagcagctgtgtagcctgggggtaaaagtccaggttttgctgttgctgtttactggctttttttttttttttggagatggagtctgactctgttacccaggctggagtgcagtggcattatcccggctcactgcaacctctgcctcccgggttcaagcgattctcttgtctcagcctccccagtagctgggattacaggtgcccaccaccacgcccagctaatttttgtatttttagtagagacggggtttctccatgttgaccaggctggtctcgaactcccaacttcaggtgatccgccctccttggcctcccaaagtgctgggattacaggtgtgagccaccgcgcctggcctactggcccattttaaaatggtaacatgttctgttgtgggcacattacttaaccacactgtgcattggtttccccatctctaaaacggattgctgcgaatgttgctgagatactacgtatagagtgtttagcatagtgcctgtcacagaataattaatacacgttgcctgttgattgtgatgatgttcaatgtcatcattattcttttccatcttatttagcccagtccttctatttaaaaatacagattgctcacaactgtaatcccagcatttttggggtccaaggcagtaggatcgcttcagtccaggagttcgagaaatagagactacaaaacataaaataggctgggcgtggtggctcacgcctgtaatcccaacactttgggaggcctaggtgggcagatcacgaggtctggagatggagaccatcctggccacaatggtgaaaccccatctctactaaaaaaaaaacagctgggcgtggtggtgtgcgcttgtaatcctagctactcgggaggctgaggcaggggaatcgctcgaacccgagaggcagagcttgcagtgagccaaaatcgtgccactgcactccagcctggcgacagagtgagactctgtctcaaaaaaaaaaccaaaaaaaataaaatatataatttgacaaaatataattcttttccccctttttgtgctgtctatagctctaactgattatttcaggataaattggtatcttaataaagatgttattagaactccgtgaaccagggagacgttgtgtatacaaagtgctgaaccgttacgagtggtgagctgagaaaccttcatagtgctccttgagaaggaggcttcctgctcaagattaggcttcagtgcctttcatagcaaaggccacaaaccgtactggccttgtttgccctctggctccttggcttgtgtcatccttttatttggaatatttatagatgaatagcagtctttttgacttagagcaagtgaagaaggatcatccgtgctgattttctttatccctcttaagataatcataattccctgggcttagccagtgttgttgttaaggggcttacggtgctttctaacaaagactgtccagtgagggtcagtaagtggctggtgtatttcgtcctggccaggtagatgccacatggggtaggtggctcttcctcgccaccctgttttatttatttgtttttgttttttcaaactacagatatagtgaaagtgcctgccttgcttgcttttgcagaggtatcaattactgtctggaaggaaaggcaccttgttgatgtttctcaggcacttacataaacatgactgtataaagagagatcacttcaaaaatggttacgtactctattgtgccatttactgtgacttgttaacacacttaaaccatattttcatagacctgacttgctcttttgctgcagtgtgcgtgatatggatataccatgcctctgatgatgaacctttgggttgtcagtttccacaattacaggcagtgaatcagtgaatatccatatatatgttgtacacaggcatatttttagggatcactacctagaagtagaattgtggattgaacgatacttgctttttaagtttttttaaatcagcttactgaggtatagtttatttttttaagtagagatgagccaccagctcgcgcctgttaatcccagctctttgggaagccaaggcgggtggatcacgaggtcaggagttcgagaccagcctgaccaacatggtgaaaccccgtctctactaaaaatacaaaaaaatcagccgggcgtggtggcaggtacctgtaatcccagctatttaggaggctgaggcaggagaatcgcttgaacctgggaggtggaggttgcagtgagctgagattgcgccactgcactccagcctgggtgacaaagcaagactctgtctcaaaaaaaacaaaaaacaaaaaacaggtgtgaaccaccatgcccagccatgaggtgtagtttaatatacaataaaatgtaccagaatcagtgtacagtggatgagattcaacaaatgtgtacagtgccacaatcaagataaaagaacgtttcaatcactttgaattataataaatagtaatatattgtcccaccaatgggctgtatcaaattgtgttactaccagcggtgtttgagagcaactgttggtttttttgtttctttgtttaagagatgggggtcttgcctttatggtccaggctggagtgcagtggtgtgatcatagctcattgcagccttgacctcctgggctcaagcaatccccccaccttagcctcctgagtagctcggactacaggtgcacccagctgatttttaatttgttgcagagatggggtcttgaaatcctgggataaagcaattctccctgctcagcctccaaaagtgctgggattacaggcgtgagccaccatgcctagccaagaccaactgttttctgtactggatattatcagtctgtctaatttttgtcagttcaatgggaaagaaattctggccgggcgcagtggctcacgcctgtaatcttagcactctgggaggccaaggcgggcagatcacttgaggccaggagttcgagaccagcctggccaacatggtgaaaccccgtctctactaaaaatacaaaaattacccagacttggtggtgcatgtctgtaatcccagctactcagcagctgagggatgagaatcacttgaaccgagaggcagaggttgcagtgagctgagatcacaccaccgcactccaccctgggcagtagagtgagattccgtctcaaaaaaaaaaaaaaaaaaatcagcgcggtggttcacacctgtaatcccagcactttgggaggccgaggcaggcggatcatgaggtcaagagattgagaccatcctggctaacacggtgaaaccccgtctctactaaaaatacaaaaaaatttgccaggcatggtggtgggcgcctgtagtcccagctactcaggaggctgaggcaggagaatggcgtgaacccaggaggcggagcttgcagagagccgagattgcaccactgcactccagcctcggagacagagcgagactccatctcaaaaaaaaaaaaaaaagaaaaagaaaaaaaaatcatacttttctgatttcccatattaattgtcaattttgttttctttgaagtgatcatcactattctttgcctgttttctatttgattgcttttttaattgcattacgagaattctttgtaggattttttttttttttttttttttgagacagagtctcgctctttcgcccaggctggagtgcagtggcatgatctctgctcactgcagtctccacctcctgtgttcaagcgattttcctgcctcagcttcccaagtatctggattacaggtgtgcaccaccacgccctgctaattttttttttttttttgcatttttagtagagacggggtttcaccatgttggccaggctggttttgaactcctgacctcaagggatccacccatctcggcctcccaaagtgcttggataacaggtgtaagcgccaccgcacccagcctgagaattctttatatattctggatattctttttttttcccccctaaggcggagtcttgctctgtcacctaggctggagtgcagtggcgtgatctcagctcactgcaacctctgcctcccaggttcaagggattctcctgcctcagcctcccgagtagctgggattacaggcatgtgccaccacacctggctatttttgttttggtgctttttttttttttttttttttttttgagacggagttttgctcttgttgcccaggctggagtgcaatggtgcgatcttggctcaccgcaacctctgcctcccaggttcaagcgattcacctgcctcagcctcccgagtagctgggattacaggcatgtatcactgtacctggctagttttgcattttttgtacagatggggtttctccatgttggtcaggctggtgtcaaactcccgacctcaggtaatccgcctgcatcggcctcccaaagtgctgggattacaggcatgagccaccgcacccggcctgtttttgtatttttagtagagatggggtttcaccatgttggccaagctgttctcgaactcttgatctcatgatccatccaccttggcttcccaaagtgctgggattataggcgtgagccaccgtgcctggcatattctttgtttttatattacaaaattagcattttgtcccacagtctagaagaagataattttttgtgttttgagacagagttttactctgtcactcacactggaatgcagtggcacaacctcacctcactgtagcctccgcctcctgggctcaggcaaagcccgtacctcagcctccttagtagcggagactgcaggtgcctgccaccattcctggctaattcgtttgtgttttttatagcgatagggttttgccatgtttcccaggctggtcttgagctcctggacccaagtgatctgcccacctcagtttcccaaagtgctgggtttacaggggtgagcctctgatctctgctggaagagttgaagaacagtcttagatcttctaagacctaggttttaggtctgtgatttccaaacctgatgcacaccagattcaaccagagaactttaaaaaattgagtaggtaggtctgttgtgttccatctgtgtgactgctggagccaggccaggagtgcttccaggttctacttctgtcccaaacagattcctgtggcatatcttctctgtgttcgttgtgcttggccagacgactctggttgagagtggtagagaggtgacatagtctgggaactgatggtcagctgtggtagggaaggctcacacgtgcagatacctattaccacatcactgcccataacccagggcgtaccacagtctagctgcatctgaatagatggtacaagagcccctgtggtgtttctggtggcccggtcaactgcattgtgaggcccagagacaggaagtgactttgggttgtgtttgactccagattggatgtttttaccacagactacctctaatcctagagatttttacttcactgtgtagtaagtaacattcagtaatgaacagaattcacagtttagtcaagatggctttgaaaaacagtgtacggaatggtttagaatgagaagtggtcatctcaccctcaccttgccccatccagagccagagcattgcctcgttttcagcattgtggacatggatgatcactttgggcttataccactactgcatgtttcttttcttcctcaacagtttcagtcattcagtcagtaccgctgtaagactgccaagaagtcagaggaggagattgactttcttcgttccaatcccaaaatctggaatgttcatagtgtcctcaatgtccttcattccctggtagacaaatccaacatcaaccgacagttggaggtatacacaagcggaggtgagtgcagcaggccgacagccgtggcctgcgaatttccagctgcttgccatctgttccaaatgaatagatcactgcaaggagagcagatgagtcaccatgtcttaggtggtggtctgttgactctttgtaggtgcttgagtacaaacagtagcagagtatttgtgctgggggctctggggcttgggagtccattggccaacagactgaaccagcacattgagatttgcgtttgtaaacacttctgtgtctccagtgcttttgtttagataagcacttctcacacgtgttggtgtcagagccactttaccctgttaaaatattgagaaccacaaaatgtatctattttaaaaaatttttttctttttttttcagtgaagagtggcatttttgcagatctctctgtctggctgagatagctggcttctcatttctgcttctgcattcaatctgttgcaatgtgttcttttgtttgaagcacataaagaaaatctggcccaggcactgtggctcacacctgtaatcccagcactttgggaggcttaggcagaaggatcgcttgagtccaggagtttgagaccagcctgggcaatatagtgagactttgtctcaaaaaaaatgtttaaattgactgagcatggtgggtggggtgcccctgtagtcccagctactcgggaggctgaggtgggaggattgcttgagcccaggaagcaaagattgcagtgaactgagatcacaccactgtactctagcctgggccacagagcgagaacttgtctgaaaaaaaaaaagaaggaaaatctggcttcacacggttataggaagtttttttgttgtttgtttttgagacagggtgtcgctgtgtcacccagtctggtcttggactcctgggctcaagcagtcctgccttggcctcccaaaagtgccaggattattggagaggattttctttgatactacaccatgtagtagtatgtatgggttgaatattcctgacttgaaaatttgaaatctgaaatgctccaaaatctgactttttgagcaccaacatgacgccgtaagtagaaaattctacacccaacctcatatgagcagttgcagtcagaacttcgtctcatgcacaaaagtatttaaaagattataataaagttactttcaggctgtgtgtataagacatatatgaaaaataaatgaattttatgtttagatttggatcctatccttaagatactcattagggccgggtgccatggctcacgcctattatcctggcattttgggaggctgaggcgggcagatcacctgaggtcag

SEQ ID NO: 178 - DNA, 4143 bp, Homo sapiens
ggctgatgacgactggtggccaatgcagatactaattaagtgccctaatcaaattgtgagacagatgtttcagcgtttgtgtatccatgtgattcagaggctgagacctgtgcatgctcatctctatttgcagccaggaatggaagatgggtcagatgatatggatacctcagtagaagatattggtggtcgttcatgtgtcactcgctttgtgagaaccctgttattaattatggaacatggtgtaaaacctcacagtaaacatcttacagagtattttgccttcctttacgaatttgcaaaaatgggtgaagaagagagccaatttttgctttcattgcaagctatatctacaatggtacatttttacatgggaacaaaaggacctgaaaatcctcaagttgaagtgttatcagaggaagaaggggaagaagaagaggaggaagaagatatcctctctctggcagaagaaaaatacaggccagctgcccttgaaaagatgatagctttagttgctcttttggttgaacagtctcgatcagaaaggcatttgacattatcacagactgacatggcagcattaacaggaggaaagggatttcccttcttgtttcaacatattcgtgatggcatcaatataagacaaacttgtaatctgattttcagcctgtgtcgatacaataatcgacttgcagaacatattgtatctatgcttttcacatcaatagcaaagttgactcctgaggcagccaatcctttctttaagttgttgactatgctaatggagtttgctggtggacctccaggaatgcctccctttgcatcttatattctgcagaggatatgggaggtgattgaatacaatccttctcagtgtctagattggttggcagtgcagacaccccgaaataaactggcacacagctgggtcttacagaatatggaaaactgggtcgagcggtttcttttggctcacaattatcctagagtgaggacttctgcagcttatcttctggtgtcccttataccaagcaattcattccgtcagatgttccggtcaacaaggtctttgcacatcccaacccgtgaccttccactcagtccagacacaacagtagtcctacatcaggtctacaacgtgctccttggtttgctctcaagagccaaactttatgttgatgctgctgttcatggcactacaaagctagtgccctattttagctttatgacttactgtttaatttccaaaactgagaagctgatgttttccacatatttcatggatttgtggaaccttttccagcctaaactttctgagccagcaatagctacaaatcacaataaacaggctttgctttcattttggtacaatgtctgtgctgactgtccagagaatatccgccttattgttcagaacccagtggtaaccaagaacattgccttcaattacatccttgctgaccatgatgatcaggatgtggtgctttttaaccgtgggatgctgccagcgtactatggcattctgaggctctgctgtgagcagtctcctgcattcacacgacaactggcttctcaccagaacatccagtgggcctttaagaatcttacaccacatgccagccaataccctggagcagtagaagaactgtttaacctgatgcagctgtttatagctcagaggccagatatgagagaagaagaattagaagatattaaacagttcaagaaaacaaccataagttgttacttacgttgcttagatggccgctcctgctggactactttaataagtgccttcagaatactattagaatctgatgaagacagacttcttgttgtatttaatcgaggattgattctaatgacagagtctttcaacactttgcacatgatgtatcacgaagctacagcttgccatgtgactggagatttagtagaacttctgtcaatatttctttcggttttgaagtctacacgcccttatcttcagagaaaagatgtgaaacaagcattaatccagtggcaggagcgaattgaatttgcccataaactgttaactcttcttaattcctatagtcctccagaacttagaaatgcctgtatagatgtcctcaaggaacttgtacttttgagtccccatgattttcttcatactctggttccctttctacaacacaaccattgtacttaccatcacagtaatataccaatgtctcttggaccttatttcccttgtcgagaaaatatcaagctaataggagggaaaagcaatattcggcctccgcgccctgaactcaatatgtgcctcttgcccacaatggtggaaaccagtaagggcaaagatgacgtttatgatcgtatgctgctagactacttcttttcttatcatcagttcatccatctattatgccgagttgcaatcaactgtgaaaaatttactgaaacattagttaagctgagtgtcctagttgcctatgaaggtttgccacttcatcttgcactgttccccaaactttggactgagctatgccagactcagtctgctatgtcaaaaaactgcatcaagcttttgtgtgaagatcctgttttcgcagaatatattaaatgtatcctaatggatgaaagaacttttttaaacaacaacattgtctacacgttcatgacacatttccttctaaaggttcaaagtcaagtgttttctgaagcaaactgtgccaatttgatcagcactcttattacaaacttgataagccagtatcagaacctacagtctgatttctccaaccgagttgaaatttccaaagcaagtgcttctttaaatggggacctgagggcactcgctttgctcctgtcagtacacactcccaaacagttaaacccagctctaattccaactctgcaagagcttttaagcaaatgcaggacttgtctgcaacagagaaactcactccaagagcaagaagccaaagaaagaaaaactaaagatgatgaaggagcaactcccattaaaaggcggcgtgttagcagtgatgaggagcacactgtagacagctgcatcagtgacatgaaaacagaaaccagggaggtcctgaccccaacgagcacttctgacaatgagaccagagactcctcaattattgatccaggaactgagcaagatcttccttcccctgaaaatagttctgttaaagaataccgaatggaagttccatcttcgttttcagaagacatgtcaaatatcaggtcacagcatgcagaagaacagtccaacaatggtagatatgacgattgtaaagaatttaaagacctccactgttccaaggattctaccctagctgaggaagaatctgagttcccttctacttctatctctgcagttctgtctgacttagctgacttgagaagctgtgatggccaagctttgccctcccaggaccctgaggttgctttatctctcagttgtggccattccagaggactctttagtcatatgcagcaacatgacattttagataccctgtgtaggaccattgaatctacaatccatgtcgtcacaaggatatctggcaaaggaaaccaagctgcttcttgacattaggtgtagcatgtctacttttaagtccctcacccccaacccccatgctgtttgtataagttttgcttatttgtttttgtgcttcagtttgtccagtgctctctgcttgaatggcaagatagatttataggcttaattcttggtcaggcagaactccagatgaaaaaaacttgcatcttcagtatacttcctaaagggcaatcagataatggatatgttttatgtaattaagagttcactttagtggctttcatttaatatggctgtctgggaagaacagggttgcctagccctgtacaatgtaatttaaacttacagcatttttactgtgtatgatatggtgtcctctgtgccagttttgtaccttatagaggcagattgcctccgatcgctgtggttcttattatcaaaattaagtttacttgtatacggaacaaccacaagaaatttgattctgtaaagaatcctctttagctgtggcctggcagtatataaatggtgctttatttaacagaatacctgtggaggaaataaagcacacttgatgt

SEQ ID NO: 179 - DNA, 472 bp, Homo sapiens
  misc_feature (451)..(451): n is a, c, g, or t
gtatgagtctgtgatgtatcaagtgctccaactactcaaggtagcgcagaagggaaaacaggcacaggccggcggggttttgggtgattacacaaatgggcttggctccttaccccactgcaaactgctgaggcgcaagggagctcccagccctcagcctggaccctgggacagtgccacctgagcccgaggtctggaagcactgcgtgatgacagttcccacctgcaactcagcagccagggaatgaatgagagttaggggtggcaggggcccggcatcaagtggggcctgcgctgccgcctccgctgcactgcctggcgcagagctccagcagctgctcctggttgttgcagacattgtaatgtgtcaggtgcagcagttgtccacgtcctcctggctgtaggtcaccttcgtgtagtggtagggagagtccgatgaagacaggttcanctccccagctgccgcctccta

SEQ ID NO: 180 - DNA, 1835 bp, Homo sapiens
agcatcatagatgctcctacactaagctggccctgcttcctatgttaaatatgacacatctgaggccctgggagaggaagtgatttgcccagtctcacacaatgagttagagccagagtgaagtcaaaacccagtctctggatgtacaagcaaggtctttttctagtcccaaatggccttttgtggtggtccagggactgccgggagcagtcgtggaactgcatcatttacagaaggtctgatctttgagtcagagtcacagaagaattgagaatagctgttgggccttgggctgctggactgagatgacatgtggacatcaggatgacaaggcttctgaagcagaggctgggggaaccagaactgctggaccagcacctgggggggggttctggtttcaaacagccctcttagtacagagtctggaggccacctctgaccagctaggtcaccttacactgttccctacagtaggggataatgtaacctttgggttttcccttttgggggaaacttaggaaaccttaggaaccttatgcgaggactcaacctgaggctggaatagctgggaaaacagaactttaggtggaggaagtggcataaaaaagttgaaaagtctggctgggcatgatagctcacacctgtaatcccagcactttgggaggctgaggtgggcagatcacctgaggtcaggagttcgagaccagcctggccaacatagcaaaaccccatctctactaaaaatataaaaaaattagcaggcatagtggcaggtacctgtagtcccagctactcaggaagctgaggcaggagaatcccttgaacccgggaggcggaggttgcagtgaaccgagatcacaccactgcactccagcctgggcaacagagggagactccgactcaaaaaaaaaaaaaaaaaaaaaaaagttgaaaagtgcagaggaatttgagaaaggtatgacctgaaaaggacacagagggaagggaaggaaggggagaacagagagggttataagcaggccagagccggattgtgaagtgcctgtatgcaaggtaggcatttggattctgctctggggagctattgaagtattttgagcagagattgtgccactgtactccagcccaggcgatggagtgagactgtctcaaaaaaacaaaacaaaaaaataaactagctgaggtctaccagttgcctgggactgaggtagtggaagagttggggtggagtaggccaagaaaatttttcgttttttcgcttttttgaaaagaatttcagaattacaaaaatattaaagaaatagtacagagttcttctatattctatccagcttccccttcttgcataaccatagtacaattatcaaaaccaggacattcacactgatacaaattacttacttattcaaatttttgattattcaaaattcaaaagtagatttaaatttcaccaattgtcccactaatgctgagtgggttctcaacaactgctgtgatgagccctggttcaagctgttctttcttggtctgtctgtgaagtcctatgatgctcccttacgataggtcttgtttttggtgtttttttttagaaagagtatcactctgtcaccaaggctggactgcagtggcgcaatcttggctcactgcaagctccgcgtcctgggttcacgccattcttctgcctcagcctcccagctactcaggaagctgaggcaggagaatcccttgaacccgggaggcggaggttgcagtgaaccgagatcacaccactgcactccagcctgggcaacagagggagactccgactcaaaaaaaaaaaaaaaaaaaaaaaaaaa

SEQ ID NO: 181 - DNA, 986 bp, Homo sapiens
  misc_feature (44)..(44): n is a, c, g, or t
tttawttttacatttacaaatgctgctgtaaattcgtaacagcnaagaaaaatatatacgaaccggtttaaaaggaaaagtaaaaaacaatccacagttgagcakttgwtktgcaaatcatcccaggaatccaaytttctktctcttgggccccaggctttcttccttgtgcagaacactctgcaagbmggcatgcagtaccttgcccacacgcttgccaktctccatcatctcgaagatgctctctgggtccaggctgcccttccccactttcctcatgcacgtcacaactcccttgctggtcaccgacaccagcaagctggccagcgagcaggcctcctcctgaagagtagcatccaccacatgccgatagccaatcttgcacagagtgacaatgcaggggacattctccacacttaktcgtatgcagtcataagggtcatctgacaattcaatgtccttcgacccctcttcatcctccaaaactcgaacccttggtatccttgtattgaagagagcagcctttacagcaatggaaatggcatcaaacaaatttccaccacattccagaagcagcacatccacatagagaacccagcagtgctcccgaggactaatgcagagggtctttaagtcgacactgcttttattgttaaatatccgatagagggtgttagcgatctcggtgccaaggtctatcacctcctctaccttcaaattcaggggtagcactggctgaacagtcaacaaagaactccaagtagccttcatttggtttctccagcttcggcgtccccatttctgctttcactcccaccaagatgtctgtgtgacccagcttgaccctggcggacccactagtgttggacaccacatcagtttccacttcgacacatcggtagtcctcacagccacggccatccacacgggaggtcttcctggacgccatgcacgatgtacacttctccgcctcgctcagcgtcacg

SEQ ID NO: 182 - DNA, 1517 bp, Homo sapiens
acggcaggagcggagccgggcccggggctgggccggcgtcgaacgcagcgaaggccggaggatggaaccaggtgaggagctggaagaggagggctctccaggtggccgtgaggatggcttcaccgccgagcacctggctgcagaggccatggcagctgacatggacccctggctagtgtttgatgcccgcacaacgcctgccactgagctggatgcctggctggccaagtacccaccatcccaagttacccgctatggggaccccggttcacccaactcagagcctgtgggctggattgcagtgtatgggcagggctacagccccaactccggggacgtgcagggcctgcaggcagcctgggaagctctgcagaccagtgggcggcccatcacaccgggtaccctgcgccagctcgccatcacccaccacgtgctctcgggcaagtggcttatgcatctggcaccgggcttcaagctggaccacgcctgggctggcattgcccgggccgtggttgaaggccggcttcaggtggccaaggtgagcccacgtgccaaggagggtgggcgccaggtcatctgtgtttacacggacgacttcacggaccgcttgggtgtactggaggcggattcagccatccgtgcagcgggcattaagtgcctgctcacctacaagcctgatgtctacacctacctgggcatctaccgggccaatcgctggcacctctgccccactctctatgagagccgtttccagcttgggggtagtgcccgtggctcccgagtgcttgaccgtgccaacaacgtggaactgacctagaggggccaaattggggagactgcccactcccccctccatgctggggttggatcctcctgtcttcctccttgtcccatgaaggccacaccccccagctctggggactcctaggtcacttgggaactacctgcatcttcagtccccttgaacttctgccctctgttcagggctgacacaagccccacaggctggggggctccggttccctgagggatgagccttcagcctccctttgtaatgctgctcctctccactgcccagcaccatgagttgggtgcagacacctagaaggagagacttcttggaacgctcatcccccgctatacctccccttcctcctgcatctccccttctttccttccccctcaggagagagaaaacttagtgcttccagcccttcttggagccttcatggtccaggggtaggggccccactggcctgagcatgccattttgaggggagggtagttgtgcctacttatcccctggcagaggggatgccaggaccatggacatgaggcttgcccatccctgccaacttacacagcctgtaccactgtccccccttccttggctactttgacatgtgcctgctcctggcatttcaataaaacccggcttgggtctgaaaaaaaaaaaaaaaaaaaaaaaaaaaaaaaaaaaaaaaaaaaaaaaaaaaaaaaaaaaaaaaaaaaaaaaa

SEQ ID NO: 183 - DNA, 2357 bp, Homo sapiens
ttttaccaacaaatttagaattatttcaagttgctttatgttaaaatatataacaagttacattttcttgctgcattaataagtttttgatttttaaaatctgatatttcagcaactaaaggaatacttttctttataggtctgttctgtttttaacctcattgactgtatatgttttatttacccgtgccaggagtctagaatcgtgcttaggtgccattcttaggtatgaaaacaagtttggagaccaatgcaggtctctgtgcagaaatctggggctctaaatgaattaccaaaccaataggaaataaaatactactcatgatgtagtgtgtcatctgaagctatgatagaatatattatttctaaaatagtattgagaagttaattgttcagtccatagtagtgtaagtgaagtgtggaggtcagccatagttgtctttcttcagcaggtactctaaccagagactgggttctgtggaaaatagaattatattcttggtttgggatcaacaagtgttttgttattgttttaatgttgctggcattgcctgaaacaaagtgccctgttattcctcttatgtcatcagaactctgcttactgaagttgaagtttaatcttaggatctagaattcttgtggttggtcgtgtattaagaaaagaaggtggtttgattttatttcttgtacttggtggaacctgttactatacaagtcatgttttgacctgtaagccgagcaaatctgaaaggtgaatcgttaatggtagtataattgtttcatttgaaactgtcagtttcttcaagtcacttctctgaaaaaaattatgatagattgatagcctgccagaaaatagcaatttctaaggtgctgccatccacacttacttattgtgaaatatgaaaatccagagtggtttgtatgagaggggaaatactggctctaagctttctacagaaaacaggaaattcatgctgttgttgacataatttttaaggaaacttttaacaagaaaattcatgagggatacaatcaaacatagttaatctcttgagtgctaatcatttgagtatagtccacatcaggaagttttatgaggttgaaaactttactttgaaatatttaattgggagactagaccatttctttttccaagtcattctgatttattgtcctagtaaatgtatgtgtatgcatatatactgatgtattgactgaatgtgtgtgtgtgtgtgtgcgcgtgtaaatctgttttcatagggaacatacattgatggctcctagtctattttatactaaaacttaaaaaaatttgctgcactttgcagttgccactttttaaaagattaatgctttgcacatttcagtaggccttaaagatgaattgctcaccaacattttagaaatacactgcttacatgtgacatactctaaacaaagtcatagtaaactgttctcttaggttcatgtattattgagcaaataaggatgtcctttcttaaaatttctacatttatgtttgcttttgtgtaaaatctttattagtttgtaagtttctcaaagaggaggtttatactggaagcagtatttctaaagtacagagattcgaccatggattgaatacagtagtggaggaatgctggtattgtggcctaatttatccttttaaactgtatgtcattagtattagccaaaacctcagagtggagtgtcttgggctgaatgatcttctcaactttgccttgtttcccatctcataaaggctccttctggttcttttcccttccaaggattgtgagtcatgctcacataggcctgggatcttctggatggggtcggggaggaggtgggggtttcctgtggctggcccagagttctagccaatggaatcattcaagaatgcctaaagttcaggggtgggaatgccatatattggtgttaatcacttggcactttcttgggcaccaatattagcactgtttcatttttaataactggaagcacttaatgattattttgtttgtttaatttcaacttaaggatattgagggtcagagaagtaaggtttatttcttgtttatgttttctggaatttatagggtgtttgtagaagggataaatgggttacctaatgagccattcttctaggctctgtaaggtatgcccttttggctaggatattttaaaataatttgcaagcttttaatattgtgctttgtagaaatttacgatttttaaaaataatttgcaattgatagattacacttaaatttataaaggatccaattttaagtttcaaaaaaaaaaaaaaaaaaaaaaaaaaaaaaaaaaaaaaaaaaaaaaaaaaaaaaaaaaaa

SEQ ID NO: 184 - DNA, 3938 bp, Homo sapiens
gaggaggagcctcgggccgagccaccgccttcgccgcggaccttcagctgccgcggtcgctccgagcggcgggccgcagaggttcaagcgattctcctgcttcagcctccggagtagctgggattacaggcacgtgccaacacacccagccaccaaaatgccagaagagatggacaagccactgatcagcctccacctggtggacagcgatagtagccttgccaaggtccccgatgaggcccccaaagtgggcatcctgggtagcggggactttgcccgctccctggccacacgcctggtgggctctggcttcaaagtggtggtggggagccgcaaccccaaacgcacagccaggctgtttccctcagcggcccaagtgactttccaagaggaggcagtgagctccccggaggtcatctttgtggctgtgttccgggagcactactcttcactgtgcagtctcagtgaccagctggcgggcaagatcctggtggatgtgagcaaccctacagagcaagagcaccttcagcatcgtgagtccaatgctgagtacctggcctccctcttccccacttgcacagtggtcaaggccttcaatgtcatctctgcctggaccctgcaggctggcccaagggatggtaacaggcaggtgcccatctgcggtgaccagccagaagccaagcgtgctgtctcggagatggcgctcgccatgggcttcatgcccgtggacatgggatccctggcgtcagcctgggaggtggaggccatgcccctgcgcctcctcccggcctggaaggtgcccaccctgctggccctggggctcttcgtctgcttctatgcctacaacttcgtccgggacgttctgcagccctatgtgcaggaaagccagaacaagttcttcaagctgcccgtgtccgtggtcaacaccacactgccgtgcgtggcctacgtgctgctgtcactcgtgtacttgcccggcgtgctggcggctgccctgcagctgcggcgcggcaccaagtaccagcgcttccccgactggctggaccactggctacagcaccgcaagcagatcgggctgctcagcttcttctgcgccgccctgcacgccctctacagcttctgcttgccgctgcgccgcgcccaccgctacgacctggtcaacctggcagtcaagcaggtcttggccaacaagagccacctctgggtggaggaggaggtctggcggatggagatctacctctccctgggagtgctggccctcggcacgttgtccctgctggccgtgacctcactgccgtccattgcaaactcgctcaactggagggagttcagcttcgttcagtcctcactgggctttgtggccctcgtgctgagcacactgcacacgctcacctacggctggacccgcgccttcgaggagagccgctacaagttctacctgcctcccaccttcacgctcacgctgctggtgccctgcgtcgtcatcctggccaaagccctgtttctcctgccctgcatcagccgcagactcgccaggatccggagaggctgggagagggagagcaccatcaagttcacgctgcccacagaccacgccctggccgagaagacgagccacgtatgaggtgcctgccctgggctctggaccccgggcacacgagggacggtgccctgagcccgttaggttttcttttcttggtggtgcaaagtggtataactgtgtgcaaataggaggtttgaggtccaaattcctgggactcaaatgtatgcagtactattcagaatgatatacacacatatgtgtatatgtatttacatatattccacatatataacaggatttgcaattatacatagctagctaaaaagttgggtctctgagatttcaacttgtagatttaaaaacaagtgccgtacgttaagagaagagcagatcatgctattgtgacatttgcagagatatacacacactttttgtacagaagaggcttgtgctgtggtgggttcgatttatccctgcccaccccacccccacaacttcccttttgctacttccccaaggctcttgcagagctagggctctgaaggggagggaaggcaacggctctgcccagagccatccctggagcatgtgagcagcggctggtctcttccctccacctggggcagcagcaggaggcctggggaggaggaaaatcaggcagtcggcctggagtctgtgcctggtcctttgcccggtggtgggaggatggagggattgggctgaagctgctccacctcatccttgctgagtgggggagacattttccctgaaagtcagaagtcaccatagagcctgcaaatggatcctcctgtgagagtgacgtcacctcctttccagagccattagtgagcctggcttgggaacaagtgtaatttccttccctcctttaacctggcgatgagcgtcctttaaaccactgtgccttctcaccctttccatcttcagtttgaatgactcccaggaaggcctagagcagaccctttagaaatcagcccaagggggagagcaagagaaaacactctagggagtaaagctccccgggcgtcagagttgagccctgcctgggctgaaggactgtcttcacgaagtcagtcctgaggaaaaatattggggactccaaatgtcctctggcagaggacccagaaaaccacactggctccaacttcctcctcatggggcattacacttcaaaacagtggggagcaacttttccaccaaagctacaaacctaaaatgctgctgccccaaagcacaagagggaagagcaccgccggggccacaggacgtctgtcctccagtcacaggccatccttgctgctccctactgactctagcttacttcccctgtgaagaaacaggtgttctcggctgagcccccaaccctctgcagaaccaggttgatctgccacagaaaaagcatctttgaagacaaagagggtgaggtcttcatgagtctcctgggcccaaagccatcttctgatggaaggaagagagtagggccagtgaaggctgcccagagagaatgtcacagatgaggctgcccctgccccccccccgccagggaggtttcatgagctcatgtctatgcagcacataagggttcttcagtgaaaagcaggagaagagcccactgcaaggatagctcattaggcacatgaccgatgcagggaaggccatgccggggaagctcttcctgcaggtattttccatctgctgtgccaaggctgagcggcagaaacttgtctcataaattggcactgatggagcatcagctgtggcccacagagagccttgctgagaagggggcaggtaaagcagagattttagcattgccttggcataacaagggcccatcgattccctactaatgagaggcagggagagcatgggcaatggagacccaccaatgatccccaaccccggtgggtactggctgcctgccctgggccagggaatggctccttataccaaagatgctggcacatagcagaacccagtgcacgtcctccccttcccacccacctctggctgaaggtgctcaagagggaagcaattataaggtgggtggcaggagggaacaggtgccacctgctggacaatcacacgaaaggcaggcgggctgtgtactgggccctgactgtgcgtccactgctgtcttccctacctcaccaggctactggcagcagcatcccgagagcacatcatctccacagcctggtaaattccatgtgcctctgggtacaaaagtgcctcaacgacatgctctggaaatcccaaatgccacagtctgaggttgatatctaaaatctatgccttcaaaagagtctctgttttttttttttaacctggtagacagtataaaagcagtgcaaataaacacctaaccttctgcaaa

SEQ ID NO: 185 - DNA, 477 bp, Homo sapiens
  misc_feature (5)..(6): n is a, c, g, or t
  misc_feature (11)..(11): n is a, c, g, or t
  misc_feature (251)..(251): n is a, c, g, or t
  misc_feature (331)..(331): n is a, c, g, or t
  misc_feature (345)..(345): n is a, c, g, or t
  misc_feature (389)..(389): n is a, c, g, or t
  misc_feature (398)..(398): n is a, c, g, or t
  misc_feature (413)..(413): n is a, c, g, or t
  misc_feature (432)..(432): n is a, c, g, or t
cctcnngctancgtggtgtgccttggaggcggagacgccaggcccgcctacttccgtccctctttctgcagggccagaggtgaccctgcctggcctcccacaccccctgcaatgagcaaggccttcactgcagccccatctcctcctcctcccccagacccctcccagccctctcctcctgttcctcctgtagcatctttgctgggctacgcagaagccccgggacatggcagccccaccccatgccacgncccttcctacactgttccctggaccatacacaggctgaagcagaggaaatcccaaagcgggtgcccatccagcccaggtnccagggatccctgncacccatttctgtgaactgggggccccagccgtggtgtggttgnttcattccnagcagagggaacttnccttgttccagcgaatttnccttttggccattagaaagaatggtgagcatgagattggggaaca

SEQ ID NO: 186 - DNA, 490 bp, Homo sapiens
  misc_feature (380)..(380): n is a, c, g, or t
  misc_feature (443)..(443): n is a, c, g, or t
  misc_feature (455)..(455): n is a, c, g, or t
  misc_feature (472)..(472): n is a, c, g, or t
aatttttttaatttttttgtgtttaaatttaaatggtatgtgtacttgcttcacattgtctttctaggttggcgttcatgattcaagtatttcaagagtgatatgttctctttttggattcatattccaaacgaaaaaactgaagttataagggaggcaactatgtgctcagacagtctgtcaatgacccacctttttttctctccgttttcttttttccttttaaaaatgtatttattgcaagttgaaaaaaaaaacgaaaaggtcaagttaagtgctgctgctgttccaaaaaaggtcacgaggtcagagttgaaagttctaagttcagattgaatccgaccctcctcccagaaggtcaccaggtagtaaaggagcanggctggcccatcctatggggatctttccaccggttggggactcccccataaagccagaagaanagtttggggggnccccacaaatgaagccnccccaagattcgggcccc

SEQ ID NO: 187 - DNA, 2441 bp, Homo sapiens
gggccacacagcggacccctaagcggaccgctggcaccggtcgggtggcagcagagtgtcgctcgacatgggggaggccggggctggcgctggcgcctcgggagggccggaggcaagcccggaggcagaggtggtgaagctgctgcccttcctggcgccgggcgcgcgggcggacctgcaggcggcggcggtgcggcacgtgctggcgctgactggctgcggacccggccgcgcgctgttggcggggcaggcggcgctgctgcaggcgctgatggagctggcgccggcctctgccccggcccgggacgccgcccgcgcgctcgtgaacttggccgccgaccccggcctgcacgagacattgctggcggccgaccccgggctgccagcgcgcctgatgggccgcgcgttggacccgcagtggccctgggccgaggaggcggccgccgcgctagccaacctcagtcgcgagccggcgccgtgtgcagcgctcatggcggcgctggcggccgcggagccggcagactcgggcctggagcggctggtgcgcgcgctgtgcacgcccggctacaacgcccgcgcgcccctgcactacctagcgccgctgctctccaacctcagccaacgccctgcggcgcgggccttcctactggaccccgacaggtgcgtggtccagcggctgctgccccttacccagtaccccgactcctctgtacgcaggggcggggtggtggggacgctgcggaattgctgcttcgagcaccgacatcacgagtggttgcttggacctgaggtggacattctcccctttttgctcctgcccttggctgggcctgaggatttctccgaggaagagatggaacggctgcctgtcgacttgcagtacctgccaccagacaagcagcgagaacctgatgcagacatccgcaagatgcttgttgaagccatcatgctgctgacagccacagcaccaggtcggcagcaggtgcgggaccagggagcctacctgatccttcgagagctgcacagctgggagccggagcccgacgtgcggacggcttgtgagaagctcatccaggtgcttattggggacgagcctgaacgtggcatggaaaacctgctggaggtgcaggtgcctgaggatgtggagcagcagctgcagcagctggattgcagggagcaggagcagttggagcgggagctggccccagagccatgggtggagagggccacacccacctgaggcccctgcagccggacaccagctccagggtcccctttgccaggctttctcagaccaggccttcctgcagctgtctgcaggccccctgggtccccttgttcagagactgtgctcttctgagaagcagagctacgcttaggctccagtaaggattggaggcactttccagccctgtgcagtgttgctaccagcaagaatgaaggttgtgcagagcagtactgtgaggtaggcaccgtgactcggctgcctgtgcagaaggtggaggtggcaggcggatggccagggagccatgagaagactcttcctgggcacggcgtggggactggacagaaaaccactgcaagccccaaggagccagctgaagcctcccaatccccagggcactgcagagtctgggcagaggtgggcgcataggtacaagtgctgctttgtcagcctcactccctgcagctctcagctccctgttccctgagacctggcctcaaagggctgacccagccatacgtagatcctggggtctttctaggactgtgcctccctgcttgacctatgctccaggaccctgccctcaacccttgtcagctccctaagtcttcctgtttcccagtctcagattgagtgggtgctctcattggcctctctagctaggccgtctccctggtcagcttccttgagcctgggccactcctccctggccttcttacctctgccaagagcctccagatgtgcctgcagcctagtccctgcccaagcttctcccccagccaccctctgcccctgtggtagagcccactataggcccaggcgccttacgtgcttctcccctggacctatgtgcatccctcacctgccagttatgtggctgccaagccccacaggctgtcatggtggctcttgccacacttcccttcctgagctgacctgacctcactgccacctcttgcattgggatcctgagggctggcccctgctcactgatgggccctcccaggcccgtcaagccctggtgaaggagcttagcttgtcttcttggcaattcacaatgcctcactccacaccctaaaactggagcgtcccctatggtctcctgctgtggcttgggtgccgggcgtctcccgcctccaggatctcctctcacctgcccccattaaagctctgccactcaaaaaaaaaaaaaaaaaaaaaaaaaaaaaaaaaaaac

SEQ ID NO: 188 - DNA, 694 bp, Homo sapiens
  misc_feature (671)..(671): n is a, c, g, or t
tttttttttttttgacagttcaggtcgtttcattcaaaaccagcccaggccatgcccggggggatccgccgctccgcggcagggctgtggcccaggtgaatgagggcttgctggacggcccctgatgccagcggccggcccggagccaccccagggctcggagtattgctcctgggcctgcctggcctcagggctcggcgccctcacctcctcggacagaccagcaacgcccacgcttcctgggctttgcctcgaggatccccggggacgggacgggccggggcttggaggggggtcggctgccacaggctcacatcacggcctccatatgcaggatcctcagggcctcggagatctgcgcgctggggtccatctggccgtacatgcccaccaggaaggcccggtggagcagcacagccgcgtgctcttggcacaggagagcgtactcaggcaggttccggagggccgtctgcaccaccttaaagtccttgctgcccaagagtacatgaacgtgggcaggaaagcggctgcaattgctgggctgttctgcatggagcgcagggccaggcttgaaggcgggttgcggcaacccttcttgggccaactcatcaaccccttggaggtgggtcggaaagaagcttagaatctcggggctcgcgcgggacaatctngctttggccatcagaacctccac

SEQ ID NO: 189 - DNA, 2077 bp, Homo sapiens
ctgtcctggtagggcacctgcacctgcgaatcttgcaccttgcaaacaatcagttacagacctttcctgcaagcaaactaaataaattggagcaattggaggaactgaacctaagtggcaacaagcttaaaaccattcccacaaccatagcaaactgtaaaaggctgcacacccttgttgcacactccaacaacatcagcattttcccagaaatactgcagttgcctcagatccagtttgtagacctaagttgcaacgacttgacagaaatcctgattccagaggctttgcctgctacattacaagaccttgacctgactggaaatacaaatctggttctggaacacaagacactggacatatttagccatatcacaaccctgaaaattgatcagaaacctttgccaaccacagattctacagttacgtcaaccttctggagccatggactggctgagatggcagggcagagaaataagctgtgtgtctcagcacttgctatggatagctttgcagagggggtgggagctgtgtatggcatgtttgatggagaccgaaatgaggagctcccgcgcctgctgcagtgtacgatggcagatgtgcttttagaagaggtacagcagtcaactaatgacacagttttcatggctaacaccttcttggtatctcacaggaaattaggaatggctggccagaagttgggctcctccgctctcctgtgctacatccgccctgacactgccgatccagcaagtagctttagcttgactgtaggcaatgttggcacgtgccaagcagtcctgtgccgaggtgggaagccagtgcccctctctaaagtcttcagcctggagcaggacccagaggaggctcaaagggtgaaggaccaaaaagccatcatcacagagaattgggttcttaaccaaaagcacctgcaggattttcctggggaagataagtgagaacaaacacatgaaaccacattccgtgacactgcaaagctgtgagttaaggttccggaagatctcaaagagttccagaccacagatattccggtgcatcactgtaacttcccggctgttctcggctgcctttgtagcgcttctgttctcggtagctacgcagggccagcaccacgctggcgccgtacatgatcacgagaagacaagcaaaggtggctgctgctccgtcggtgcctgccagctggcagtccatccaggtgagacccttgcgggcatagagcctctctcttgttttgcaagtgtcggtgctattgatctgcagagccacgtggaggtaaacaccaatgcctgtgcagtagcccactgccgctaggaggctgaaggcggcctccgtgaggagccacttccctgacaacattgttcgactcttggctccttggagtaaaacacccatggtgaggacccccagacccagagaaacagccacgccaccgtatatcaggggcgagcggaggatcgtgtactgctggtccagctgccgaacctgctctagctcagtgccctcgaacgatgttttcagatcagttcctacaagaggagccacattttgttaagtggccttcgacttcattgtatggatggatttgtctattcaaccaggaccttactgatagatatttggactgaaaggaacccacaaatggcacgaggcagaggaagccaacaggccaacagactgaagatcttcttgtccgaggtcagcttttatttgttactgacagaggccccaaatccttcttaggtgtccttctgggagagggtctcctgccattcccgtggtgttcagggatgagcatgaagagaaatacaaatgaaccgagagcaggaccaccaggttcaagtccccgctttttactgccttgtcatcttggccaagccattcagtccttctaagcctcagacaatatgacaaatgaagctaagtctgccaatcttcacccacagggatgtggggaggctcaaatgaaagcaaccgtgtgatactgtgggaagttaacaacaacaacaaaaaagcaagtatgtgaaaatactctaaaaataaaataatgtacaaatgg

SEQ ID NO: 190 - DNA, 4434 bp, Homo sapiens
ggtgttttgaaacataaaaggttgcaccctcgtgtgtgccttgtgttaaaaggagcccacgcagccgacggcagcaggagcaaatggcctgctctgatggggacaggcaggaagtccttcggggcatttctgtttcatcacagcttttcctggggctggtgagtctgttgggcctttggttgacagggaagcgcatgagcccatgttggtggatacaaagcatttggggcctggcagaatccagagaggggaagaaggtggccctaggaactggcctattttgtgatccccagagaccagtgtggctgacccattagtgctacaaatccatagccaggcctcaggacagcttttggtcttgtttttattaagccactgaccagtggttaggagcaagtggatcataaccttaacatttttattgaaaattggagccttgacctggggatgtgaaacccacaagctgcacatttctctgtagactgcatctggacacttgtcacattgccgactgggtctgacagtcatcgccaggactgcctgggcctgtgttcattcccagtcaatgagtcctgggacacagacgtcccggactcgtgcccggtgccaggcctcatgcccgcccaaggatgaagacatacctgccatcaccatgcaagtgccgggagctcttctcagcgcttatgtgtgggaacacgagtaatcccacaccctaggaggtggcactactcttaccccagtgtgcagatgaagatcagaggccagaaaaggggggtgacttcagtcacacagcaagcatgtggcagagctggagtccaggtcgtcattctgagcctgcccctggctgggccattgtgctttgtcacctctctacagaaggtgggcctcatcccctacatcaggccccaagcctggccagcgctcttcccaccctgccccaggccacctgctatgcctgtgagggctgtgtgtgagcactctctggagcgccgctgattctcttgtctctcccctgcgtcctgccaggaagctgatcagtatctcctttggggacctgaaccctttccccctacgccagatccggaaccgacgcgcctaccacttggagaaagtccggctggagctgaccgagctggaggccatccgtgaggacttcctgcgtgagcgggacaccagccctgacaagggtgagctggtcagtgacgaggaggaggatacctgagtgggctcgggatgctgctcttccttccttcacaaccaaagtgtgcccaaagggtgaaagtgcacttaaaagccagaatgtaacgtgtgtgtcctctggggatctgctgggcagatgtcccaagccaggctgcccttcctcatttcccactgtgcggggggcaggggtgggaggtctaatctgtttacaaccatttccgtgccatgcttttggttacacgtatctcagtcacgctttctgcctggttggtggatcctcaggcttaccagtggctatttgcaagagcctgtttccagcctccgtcagcctgtcggtgctctgaccctctgaaaccttgctttgctgggcatctccccatattctctctcctgtacatagtgggcagtggtgtgtggttttgaatggcagtgctataaaggatgccagctgtgctttaggcacctgtaggccagagggttgctgcctcaggcataaggttggtatgaaaaggggctgccttagaaaagcaggcacatcccttgttcagaaatggccactgtaggaaagcctgtgaacctcccaccagtggctttaagctgccagccatgccccatttctagaatagcctttgctcttccacacgcaacccttccatcagtgtcttccagcctgcatggggagggcctggctgcccagacacccaccctcacttctcatggccagcctgtgtttgcagatcactgggctgctctgtccccagcttgccccgtgccaggcatggctctgtgagattctgtggaatgcccttcttgacttgtggaaatcattcaccaagtacgatgggatgggattccaagtaaacagtggaccgtcatattgcaaagcaggcccacgcctgggctggccttggttgaggggatggaggaatgttttcgggggtgctttgcagggcagtggtgcagccgcagcgtgaacgctcttggacagctgaaaaccatggcctccttggggatggccagtgctcctggtgtctccacctgcctgggttgtgcaggaggccggctgccagtgcctggggctgggaaacttttttgcttggggcaggcttgggtgagctctcccagatgtgtgcccaccccaccactgcctggaacatccttgttctctgccaggatgcaggggcactgttgcctctgacacagcagtttctgggaactcagaggactgcctttctgaaggctggggagaggctttgagcaaggagcttgtttttgcttaatcgctctagaccatccctgatgcgtagatgtgagaggatgttttctggcacagtgttatgaaaatacaagataaatgatctcagtggaatgtttcatattacccgaaaaaaactggaaatcatcctttgttgtgaacacactgagactaagaattgaagcaatgcagttttaagaagtatttttcctattttttgctgtcaactttttggcaatgccacggcaaagttggtgtttcagcacatgctagagtgagctccggcttcgtgtgtttaaccaactccactaatgtttcactgggtagacggagctggcctctatatttagccagaagcctttgcctcttttcaggcatcaaaaatgggttttgtcattgtctttgtctttgagagcagcagtttgaggtctgactccttcagttgtcctgtgagctgggcgttgcagtctgctcgaatcaagtgttggaacccccccacccctcagcccatcgtgaaacgacagctgtcagcctggggggcggctgctgaggaggtgcagcaggaatggggctgggccctgaggttttactttccgagccaatggcccctggaacatgccagcacacactgccatgtcctggggctaagagctgcctttagggacaggctcgtgttgtccagtttgccctgagagatgcacctgaccaggggcccgtcgtggctgcaacccacggtggtatgttagtgtttccaggcagttgtcagcagctgccgggtagtgtgtgtgtgcgacagcaggagagttcctggaggaaagggactggggacactttctcagaggttctcctgcctggaatcaagtgatgcgtgtccagaaggcaagagagggcggctccgcctggttaaagtttgggaacgggacggagccaactcctccttccaggactgtgggccccactcttttgcgctaacacttcccctccctcgggtcactgaggaaagagctgctctgtcccctccagtgccctgaaggtccctggcctccactggctgccatggcagggggcccttctgacaggggctgccccaagctgctgttcctcctctgaaccttcaccccaacacccagcccgtggcccctgcaagggggaccctgccagctgggaaacccaaaggcctgtccaaacgtgcgcaccaggaccgaggggagctccctcccaacacctgctaggaattgccaacttttaaatggatggggttttttatgggttgaacctctgttaatacttttgtacactctcactacagtttatatttttataggctattttctcaaggtgtttctagattccacatatctattttatataacaagttcttatgttatgtgtgtgactcccttgtgtgtatctgtgccagcctcagcctccgagttgcttttccctctggccctgactctcactgactcaccgatgtgatgtgcaggcccacttcttaccccagatagcctcgggcgctgcctgtagtcatgctgacagctgtacagtagccgccaagactgctgacagctggagacggttctggtttcaactacggtatattgatatcggaagtattctagacagatcctcggttgggttttctagctacatgtttgtattgcacagatccccacctgccatcctatagtgttgtcttcctgtgtgttccggggcttctgggcagctgggcctgcccggggaagtccttgcaggtgggaggccatacagagacccactgtgtgccactgagcgtcccactgctgctgggcaactggaggactgcagggggcgccaggtgactctctccttttatatcacagcagctcctgtgctgaccttcaagttacgttttggaactgtaatactaaaggaagaaataaactactaatttgtataaaaaaaaaaaaaaaaaaaaaaaaaaaaaaaaaaaaaaaaaa

SEQ ID NO: 191 - DNA, 2012 bp, Homo sapiens
ttttttttttttctcctagtgctttctgggtccaggcaatcttcatttgagaaccactagtttacagcactctctgagccaaggaatttggagtcaaccagtgctcatctaggtatcaaaatggtggcaagccccaagtgcaactaacaacctacagaagacggaagtctaactttagtcaacactcagggagtggggatgaagaatgtagtcttcaaagctcctggccactatggaacactgttctcctgctgcaccctacatgctcacccctccatcgtcaaagcctcctcctcctggttctggaacaggtggtaaagcttttggaggccctgtgccaaccagtgctctccgcaccgttaatctgggaaccccaaatcaagatgctcgaccctcctgggattctgagaggtcagccctgtggcaccagaggctttctggaatgattcatcatattgtcagctgaaattctactgaagtggatgcccaagactagtttctcagtactgcagtatctcactcaatcccagtgatccgaaaatccatccatcctcccaggacagtctgactgtgtagctggttcaggaaaccaaaggcaagcgggggtcactcatccctccagagcctccagactgagaataaggaaaaaaatcgctaggtgcagtggctcacgcctataatcccagcactttgggaggctgaggtgggtgaattatgaggtcaggagattgagaccatcctggccaacatggtgaaaccccatctctactaaaaatacaaaaattagctgggcgcggtggcgtgcgcctgcagtccctgctactcgggaggctcaggcaggagaatcacttgaacctgggaggcggaggttgcagtgagccgagatcgcaccacaacactctagcctggtgacagagcgagactccgtctcaaaaaaacacccaaaaaaaccaacaaaaaaaaccccaaaaatcagctgggataggtcatgaggtcatgacaggccatcaactatttaagagatttttcaactaagaatataagaacatattgccataaaattttaaaatccctatattctagaggttctatctattttcagttgtatgctccttaaacttatctgtatttaggcttcccccaaaatgaattctaacagaaaaaaaaaacttcggtaaaaaaagaatccataaacactaaatattttaatacctttatttacctcctctctaacagaactaatcagcagcagataatatatttgttacgaagagaattaattttctagttaaacatgcacataaaaacataaaggtgacaatatttggcaatatatgacactaataaaggtaacatttattgggctatccactgggctaagcgcttgactcagatcacctcagttaatccttacagcaaacctataaagtaggtgctattcttatttccattttatagatgagcttataaatgaggaacctcattactgtaatttaatcttcaccaacccagaatttgagttcagtgtttactctggctattaaaaggttgaataagcaaattagaaattaaacgggatttcagaagatatatttaacctactagaaggtcgtacgttttaagacatactgaaaaacagatgctaactgcttccaacaggatgtgtttaggaagatcctgcctgacactataccacattaaaacacttgaagattcaaacttttactagttaaggttgagtgtcctctcactattatccccaatgactggtccaagttagtaaggtattattctacttctatgggtggtacagtatggtggatgtcagctgcggctcccaagttctatttccctcctaccctgacaaagtgtccagaactctacacacccccagcctccccacagcctggtgcaggagccagtctggtgcagaagccagcctgaggatgaactgacccagggaggaaggagtggagagattaaaaaaaaaaaaaaaaaaaaaaaaaaaaaaa

SEQ ID NO: 192 - DNA, 1695 bp, Homo sapiens
tcgtaaatgtgcatacgtctgtgtgtgtgtgtgtgtgtgagagagagagagagagagtacacgcattagcttgagcgtgaaacttccagaaatgttcccttgccctttcttacctagaacacctgctatagtaaagcagacaggaaactgtttacagggcctggaggcccagtcttgtcctcctctgtcaccgacttgctgtgtggacctgggacactctcttcacttctctgggtctcaattcatttactgttgaacacggacaatcatattcttccctcctggctgggaggactacaaagatctgaggaaataatggatatgaaggggctttggaaagtacaaagccatcttctcatgaggggcatgacagaaccctctttgcagagtgacctttggacgtgcagtcagttcttggagaagtgtggcccctgcagcagtgtcacggagaacacagagttccagagagcaagcctggggcaggggctgtgcaaacgtgtggtcagaggaacatcaaatcctggaaacttggtggcagggagaggcctggggcctttaccccatgccccctgggatctccactgtgactgtcccacaccctctgcccaactcttgccccatcagctgccctgcattgccttgagctgggacccctaggaaatggaaaccaggctcccctctctcaaggtatctgggaaccactgtctcaggagctgaagccaggagacctgaggggaggtctggccggagagtccgtgcgtaaagcagctacagctctgacctctctgacctgcagcctctcagggcgtgcgaagtccaaacgcactggcaacttcaccccctttgccctaacgcgggcaggctgacttggaggggtgcttccctatttacacctcagggtgaatttgttgatcaccttagctcctgtggtccttggggcttagggagaggagggaggcatgcctgggtcccaggtaagctggcaagaggaaagggccacaggctaggggaataacgaggccatgaacaagacatctcaccccagttacaatggcttttatccaaaagacaggcaatgacaaatgctgatgagaaagtggagaaagaggaatccccatatactattggtgggaatgtaaattagtatagccactatggagaacagtacagtttcctcaaaaaactaaaaataggctgggcgtggtggctcatgcctgtaatcccagcaccctgggaggccgaggcaggtggatcacttgaggtcaggagttcgagaccagcctagctaacatggtaaaactctgtctctactaaaaatacaaaaattagctgggcgtgctggcacgtgcctatagtcccagcaacttgggaggctgaggcagaagtattgcttgaacccaggaggcagaggttgcagtgagctgagatcaccccactgtcctccagcctgggcaacagagagactgtctccaaagaaaaaaaaagaaatagaactaccatatgatccagtaatcccactgctgggtatctgtcagcaaggaaatcagtatattgaaaagataccagtactcccatgtttactgcagcactatttgcaatagccaagatatggaatcagcctaagtgtccatccacgaatgaatgaagaaaatgaacacacaatgaaatattcagccataaaaaaaaaaaaaaaaa

SEQ ID NO: 193 - DNA, 2376 bp, Homo sapiens
aacagcctcaccctgcagcccccagcacctcagcccgtctttctttctcacggggttccacttcatcagtctgtgaatcctcctgtgttgcccttgagtcagccagtcggacctgtcaataagtctgttggaactagtgtcctccccataaatcagactgttcgccctggggttttacccctcacccagcctgtgggacccataaacagacctgttgggcctggtgttcttcctgtgagcccctctgtcacccctggggtcctgcaggctgtctcgccaggggtgctttctgtgagtcgggcggtcccgtctggagtccttcctgcaggccagatgactcctgcaggccagatgactcctgcaggggttatcctgggcaaacagcaacttctggggttcttcctactggccagatggtccagtcaggagttctccctgtgggccagacagctccgtcacgggttcttcccccaggccagacagccccattgagggttatctctgcaggccaggtggtcccatctgggcttctttctcccaaccagacagtctcctcctcagctgttgtgcctgtaaaccagggtgtgaattctggtgttctgcagcttagtcagcctgttgtgtcgggagttcttcctgtgggccagccagtgaggcctggggtcttgcaactcaaccagactgtgggcaccaacattctgcctgtgaatcagccagtgagacctggtgcttcgcagaacaccaccttcctgacatcaggctctattctcagacagctcatccctacagggaaacaagtgaatgggattccaacctacacgctggcccccgtgtctgtcactctgccggttccccctggaggccttgcgactgtcgctccgccccagatgcccatccagctcctgccgtcaggtgcagctgcaccaatggccggttccatgcccggcatgccctctcctccagtgctggtgaatgctgctcagagcgtgtttgttcaggcctcctcctctgcagcagacacaaaccaggtgctcaaacaggccaagcagtggaagacctgccctgtctgcaacgagctctttccgtccaacgtctaccaggtccacatggaggtagcgcataagcacagcgagtccaagtctggtgagaaacttgagcctgaaaaactggcagcgtgtgcaccatttctaaagtggatgagagagaaaacggtgcgatgtctgtcttgtaagtgcttggtccctgaggaagagcttatacaccacttgctgatgcatggcttggggtgcttgttctgtccatgcaccttccatgatatcaaaggtctttcagagcacagcaggaataggcacctggggaagaagaagttgcctatggattatagcaacagaggttttcaattagatgtcgatgccaatggcaacctgctctttccccaccttgatttcatcaccatattgccaaaggagaagcttggggagcgggaagtctacttggcaatcctggctgggatacactccaagtcactggtgcctgtgtatgtgaaggtgaggcctcaggctgagggcacccccgggagcaccggcaagcgagtgtccacctgccccttttgctttggcccctttgtgacaactgaggcctatgagctgcatttgaaggagaggcaccacatcatgcccacagtccacacggtcctgaagtctcccgccttcaagtgcatccactgctgtggggtctacacgggaaatatgaccctggctgccatcgccgtccatttggtgcgctgcagaagtgctcccaaggacagcagctcagacctgcaggcccagccgggttttattcacaacagtgaactgcttttagtcagtggtgaagtgatgcatgattccagtttttctgttaagagaaagctgcctgatggccacttaggggccgaagaccagcggcatggggaggagcagcctcccatcctaaatgccgatgcagccccgggtccagaaaaggtgacgagtgttgtgccttttaaaagacaaaggaatgaaagcagaacagagggacctattgtcaaggacgaggctcttcagattttagcattagatcctaaaaaatatgaaggccgttcttatgaagaaaagaagcaatttcttaaagattatttccataagaaaccatatcctagtaaaaaggaaatagaactgttgtcctcactcttttgggtgtggaaaattgatgtggcttcattttttggaaaaagaaggtatatttgcatgaaagcaataaaaaatcacaagccttctgtacttttaggctttgatatgtctgaacttaaaaatgtgaaacatagattgaactttgaatatgaaccataaaacttgc

SEQ ID NO: 194 - DNA, 4088 bp, Homo sapiens
cgaccaggccgggcacctccgagcgcaaggacagcgcgaggtccgcgcagcccagcgcagccatggagccccgcgcggactcactctatgatgtccctgtcggtgcggccgcagcgccgtctgctcagcgcccgggtcaataggagccagtccttcgcaggcgtcctcggcagccacgagcgggggcccaggagtttcccggtcttcagcccgccggggcccccacggaagccccccgcgctctcccgagtgtccaggatgttttccgtggctcacccagccgccaaggtgccgcagcccgagcggctggacctggtgtacacggcgctgaagcggggcctgacggcctacttggaagtgcaccagcaggagcaagagaaactccaggggcagataagggagtccaagaggaattcccgcttgggcttcctgtatgatctggacaagcaagtcaagtccattgaacgcttcctgcgacgactggagttccatgccagcaagatcgatgagctgtatgaggcatactgtgtccagcggcgtctccgggatggtgcctacaacatggtccgtgcctacaccactgggtccccgggaagccgagaggcccgggacagcctggcagaggccactcgggggcatcgcgagtacacggagagcatgtgtctgctggagagcgagctggaggcacagctgggcgagtttcatctccgaatgaaagggctggctggcttcgccaggctgtgtgtaggcgatcagtatgagatctgcatgaaatatgggcgtcagcgctggaaactacggggccgaattgagggtagtggaaagcaggtgtgggacagtgaagaaaccatctttctccctctactcacggaatttctgtctattaaggtgacagaactgaagggcctggccaaccatgtggttgtgggcagtgtctcctgtgagaccaaggacctgtttgccgccctgccccaggttgtggctgtggatatcaatgaccttggtaccatcaagctcagcctggaagtcacatggagccccttcgacaaggatgaccagccctcagctgcttcttctgtcaacaaggcctccacagtcaccaagcgcttctccacctatagccagagcccaccggacacaccctcacttcgggaacaggctttctataacatgctgcgacggcaggaggagctggagaatgggacagcatggtccctgtcatctgaatcttcagacgactcatccagcccacagctctcaggcactgcccgccactcaccagcccctaggcccctggtgcagcagcccgagccccttcccatccaagttgccttccgcaggcctgagacccccagctctgggcccttggatgaggagggggccgtggccccagtcctggcaaatgggcatgcaccctacagtcggactctgagccacatcagtgaggctagtgtagatgctgccttggctgaggcttcagtggaggccgttggcccagaaagcctagcctggggacctagcccacctacacacccagctcccacccatggagagcaccccagtcctgttcctcctgccctggaccctggccactctgccacaagctctaccctcggtacaacaggctctgtccccacatctacagaccctgccccatctgcacacctagactcagttcataagtccacagactctggcccttcagaactgccaggccccactcacaccactacaggctctacctatagtgccattaccactacccacagtgctccaagccccctcactcacactactacaggctccacccacaagcccataatctctacccttactactacaggccctaccctcaatatcataggcccagtccagactaccacaagccccacccacactatgccaagccctacccataccacagcaagccccactcatacttccacaagccccacccatacccccacaagtcccacccacaaaaccagtatgtcacctcccaccactacaagtcctacccccagtggtatgggcctagtccagactgccacaagtcccacccatcctaccacaagccccacccatcccaccacaagccccatccttataaatgtaagcccttccacttctctagaacttgctaccctctccagcccctccaaacactcagaccccaccctcccaggcactgactcccttccctgtagtcccccagtctccaattcctacactcaggcagaccctatggcccccagaactccccacccaagtcctgcccattccagtaggaaacccctcacaagccctgccccagatccctcagagtctacggttcagagtctaagccccactccctcacccccaacccctgcaccccagcattcagacctttgcctggccatggctgtccagaccccagtcccaacggcagccggagggtctggggacaggagcctggaggaggcactgggggccctaatggctgccctggatgactaccgtggccagtttcctgagctgcagggcctggagcaggaggtgacccgcctagaaagtctgctcatgcagagacaaggtctgactcgcagccgggcctccagtctcagcatcactgtggagcatgccttggagagcttcagcttcctcaatgaagacgaagatgaagacaatgatgttcctggggacaggcctccaagcagcccggaggctggggctgaggacagcatagactcacccagtgcccgccccctcagcacggggtgtccagctctggatgctgccttggtccggcacctgtaccactgcagtcgcctcctgctgaaactgggcacatttgggcccctgcgctgccaggaggcatgggccctggagcggctgctgcgggaagcccgagtactggaggcagtatgcgagttcagcaggcggtgggagatcccggccagctctgcccaggaagtggtgcagttctcggcctctcggcctggcttcctgaccttctgggaccagtgcacagagagactcagctgcttcctctgcccggtggagcgggtgcttctcaccttctgcaaccagtatggtgcccgcctctccctgcgccagccaggcttggctgaggctgtgtgtgtgaagttcctggaggatgccctggggcagaagctgcccagaaggccccagccagggcctggagagcagctcacagtcttccagttctggagttttgtggaaaccttggacagccccaccatggaggcctacgtgactgagaccgctgaggaggtgctactggtgcggaatctgaactcggatgatcaggctgttgtgctgaaggccctgagattggcgcccgaggggcgtctgcgaagggacgggctgcgggccctcagctccctgctcgtccatggcaacaacaaggtcatggctgctgtcagcacccagctccggagcctgtcactgggccctaccttccgggagagggccctcctgtgcttcctggaccagctggaggatgaggacgtgcagactcgagtggctggctgcctggccctaggctgcatcaaggctcccgagggcattgagcccctggtgtacctctgccaaactgacacagaagctgtgagggaagctgcccggcaaagcctacagcagtgtggagaagagggacagtctgcccatcgacggctggaggagtccctggacgccctgccccgcatctttgggcctggcagcatggccagcacagcattctaaactattcacccatgggttcctggtgcccctttccccccactttcagggctcaccaggcactggcagggagggtaagggctggctccagatacccctcccccacagattcctagcaatgaaaatctaatatattcttctgttgcccctggggttggagagtcagtgcctgcagtcaagtgcctcccagcctcggctcagcacatcccttgccacaaatcagtgtctggggcttggccaccctgccgctgcccagccacatcccttggttttgtattttatttacagagttttacagaaaataaaaaagcaaaatgtctttcctaaaaaaaaaaaaaaaaaaa

SEQ ID NO: 195 - DNA, 565 bp, Homo sapiens
tttcagttgagcagacatttattaagcacctatcaagtgcaaggcactgtgctaggcgccgtgggaaatacagagaacacaggcggtccctgcccacgaggagctcacagtctagaaagggcagcaagacagtacacaatcagtggcagcagcaccagccagagtggcaagtgctcaaagcgagacacaaagtgctgtgcggtcacaacatcatggggatgcttctggcagaagcactggaaaggagacgaggactcaggctgggccttccaggagggaagccatttgggagaagggcatctctagcggagagaggtccatctgcagagcccacaggtcatgggaaacatgtggctgcagggagagtttggggacagtcaagtatggctgggaggtggacagccacggacactaagctcaggagatgtgaactttgtggtctggtcaaacagccactgcagatcacttcgcaggaggaggggtgactagaagtatgttactggaaggtaaatctggccacactgcagcatctggacggcagagggcagcgctgggaggggccagc

SEQ ID NO: 196 - DNA, 2179 bp, Homo sapiens
tcctgcctcggcaaccccgggccctgagggcaggccccaaccgcggaggagcaggagagggcggaggccggcgggccatgccctggtcgtcccgcggcgccctccttcgggacctggtcctgggcgtgctgggcaccgccgccttcctgctcgacctgggcaccgacctgtgggccgccgtccagtatgcgctcggcggccgctacctgtgggcggcgctggtgctggcgctgctgggcctggcctccgtggcgctgcagctcttcagctggctctggctgcgcgctgaccctgccggcctgcacgggtcgcagcccccgcgccgctgcctggcgctgctgcatctcctgcagctgggttacctgtacaggtgcgtgcaggagctgcggcaggggctgctggtgtggcagcaggaggagccctctgagtttgacttggcctacgccgacttcctcgccctggacatcagcatgctgcggctcttcgagaccttcttggagacggcaccacagctcacgctggtgctggccatcatgctgcagagtggccgggctgagtactaccagtgggttggcatctgcacatccttcctgggcatctcgtgggcactgctcgactaccaccgggccttgcgcacctgcctcccctccaagccgctcctgggcctgggctcctccgtgatctacttcctgtggaacctgctgctgctgtggccccgagtcctggctgtggccctgttctcagccctcttccccagctatgtggccctgcacttcctgggcctgtggctggtactgctgctctgggtctggcttcagggcacagacttcatgccggaccccagctccgagtggctgtaccgggtgacggtggccaccatcctctatttctcctggttcaacgtggctgagggccgcacccgaggccgggccatcatccacttcgccttcctcctgagtgacagcattctcctggtggccacctgggtgactcatagctcctggctgcccagcgggattccactgcagctgtggctgcctgtgggatgcggctgcttctttctgggcctggctctgcggcttgtgtactaccactggctgcaccctagctgctgctggaagcccgaccctgaccaggtagacggggcccggagtctgctttctccagaggggtatcagctgcctcagaacaggcgcatgacccatttagcacagaagtttttccccaaggctaaggatgaggctgcttcgccagtgaagggataggtgaacggcgtcctttgaagcaggatcagacccagccagcagagatggagagtgactctgttggcagaaggcaggcgaggataagctaacgatgctgctgtggcctctatgcactcagcaagagcgggacgcctgtgctgggccgggcaccagggatggtgctgagtcgggcagaggcctcctttcaaggagttcacagtgaacaagatgagaagggctgggccctggagggtcaagagccccaattatgtacaagacactttgggaggaaagaagactaccttttccccctgccattggtatagctggtgccccaaaacttccacctccctccctggccacctctaaaatgactggtataggtgctgccccaccccttagctcccctatcctgggctaggaggccacaggggctgtcctctagaattcttccttccctcccccacaccattcattcaattcatgaaacaaatctttgccaagagcagtttatgtgccaggaacatcattctgtccttgcaacctggaacaagaccagctaccagcctagcttcatccgctacttgcaccaaccagtcccgggttagatcccaaatgctagaagccagggatgcccaactctgggtggccccagtcagaacctctgggatctcagtgaagctggcctggcctctgctcctgctctcaaggggctgcttttcaaccaagagccttgtgagcctggtctgagccttgcacagccactgagtattttttttgccttagccagtgtacctcctacctcagtctatgtgagaggaagagaatgtgtgtgcctgtgggtctctacaagtgacagatgtgttgttttcaacagtattattaggttatgaataaagcctcatgaaatcctcaaaaaaaaaaaaaaaaaaaag

SEQ ID NO: 197 - DNA, 1353 bp, Homo sapiens
caatatctgtgtcgttcttggcagaaattatattttccagcccgtgtctgcaggtatattcgaattgttgggactcacaacacagtgaacaagatttttcacattgtggcttttgaatgtatgtttacaaacaaaaccttcactcttgagaaggggctgataggttactactttgggattgtgacactcaaagtggacacagtggaacacctgggagagaaaaggaaaagaccccatgagtgaagggtcagcatgcggccctggagttgccgcaagttgggatactgccctgcccagctttgggggccaccacgagggagttagaggaggtccttcccactgcccacgcctgccccggcgcagacacctgatggcaactagcatgctgtaaacacattttgatcagtcaagaggaaaggaaatgagccagtggcccaaaagttagagacaccatgacacggattcccacaaaatcttcacactggattactccgtttttgccaacctttgtctaatgggctcttttttcttttttaattaatttttgtatttggcagttgggttaaaagtcaacaggagttgactggtggtggtggtggtggtggttcgattctgtgaggttgtggaaagcaggtccacagataacgtccaccatctgtgtggcatctgcgtgggttgtctctgggtattctggttttctcccgcgtcccaaagctgtgcacttgaggttcattggtgtgtctgcagggtcccagtctgagtgcatgtgaatgtgtgtgagcgtgccctgcaatggcatggtgtcctgtcctgagctggttcctgatgcatagttctcctggccctgcaatggttgagcacagaccctgctaagcagccgtgctggggagtggacttcaacctcatgtggctccagccagcctggaacaaacgcccccaatgtgtagaagccagccacctggccgacagtcaccctctaggagctaagaagagtttgcatacctgacagcaggtcagcctggaagcaccatgaactctgtgccaacaccgtgccagcactgtgcagacagggcacagcaccgagctcagcgccccgcaagcaagggtaagccatggccctgacctggagagtagacaacgtgcttcggggggtcctgacatgcatgtgtgagctgtggggtgcaggagagaagggcggggtgggggctgtcgttgccactgcacgagcatgtgtgcacatacatacacacggccttctaccgtagaatcaagttcacagagacaaatgtagtatcaactgcagaattatattgaaaatataaattccacgcttaaaaaaaaaaaaaaaaaaaa

SEQ ID NO: 198 - DNA, 2061 bp, Homo sapiens
atgaggcggacaggccccgaggaggaggcctgcggcgtgtggctggacgcggcggcgctgaagaggcggaaagtgcagacacatttaatcaaaccaggcaccaaaatgctaacactccttcctggagaaagaaaggctaatatttattttactcaaagaagagctccatctacaggcattcaccagagaagcattgcttccttcttcaccttgcagccaggaaagacaaatggcagtgaccagaagagtgtttcatctcatacagaaagtcagatcaacaaagagtccaagaaaaatgcgacccagctagaccatttgatcccaggcttagcacacgattgcatggcatcccctttagccacttcaaccactgcggacatccaggaagctggactctctcctcagtccctccagacttctggccaccacagaatgaaaaccccattttcaactgagctatctttgctccagcctgatactccagactgtgctggagatagtcataccccactggctttttccttcaccgaggacttggaaagttcttgtttgctagaccgaaaggaagaaaaaggggattctgccaggaaatgggaatggcttcatgagtctaagaagaactatcagagtatggagaaacacaccaaactacctggggacaaatgctgtcagcccttaggcaagactaaattggaaagaaaggtgtctgccaaagaaaacaggcaggcccctgtcctccttcaaacatacagggaatcctggaatggagaaaacatagaatcggtgaaacaaagccgtagtccagtttctgtgttttcctgggacaatgaaaagaatgacaaggactcctggagtcaacttttcactgaagattctcaaggccagcgggtcattgcccacaacactagagctccttttcaagatgtaaccaataactggaattgggacttagggccgtttcctaacagtccttgggctcagtgccaggaggatgggccaactcaaaatctgaagcctgatttgctctttacccaggactctgaaggtaatcaagttatcagacaccaattctaaatgtttgaagctttgtttctaaaagtaccttgaaatgatagagatgtaggaaaatatagttgtgggtggagagaggagtgagtttgtttaggtgggaaggtggcatgggatgaagttgtcattactgagcatcttctctgtgtaaataaagggcagtaccattgttaagacagtgggattggcatcatggctttccctcaggaaggtggtggctggtaaattccctgaatgagtctatgatgaacactgaggcagcacagtgggtatttatctctatgaaagtgccttttactcagcctgcacagagccatctctttgcccttccagatgtctgactgggaccttgcttatggatgtgtttttttttttttttttttgagatggagtctcgctctgtcgccaggctggagtgcagtggtgcgacctcagctcactgcaccctctgtgtcccggattcaagcgattctcctgcctcagcctcccgaatagcagggactacaggcatgcgccaccacgcccagctaattttttttggatttttagtagagacgaggtttcaccatattagccaggatggtctccatctcctgacctcctgatccgcccacctcagcctcccaaagtgctgagattacaggcataagccaccgcgcccagccagatgtgtgagcttttaatctctggctgatcttaacccacatcagcctaagcttgggatgattactcttgacccttttttttcagtgattagcaaatctccccacaacccaggtgtggagagaagagaggtagaatggtgctagtttcctattttatttttgtggtaactgtacagcactttaaagttatatactctatgtttaaatatctcccttaaaaagcctgagctgtacaacaatctggatgtgactctgttacccttttcccacaagataggagggaatcccctttgtaaaactatgaatccaaataaatgtttacaaagtg

SEQ ID NO: 199 - DNA, 214 bp, Homo sapiens
ccaaaccatctagttttcataacacctgaagtgtcatgagacagatatcccatgttctcacaataactctttattgtttagctagccccagtgacaagtctgagccagctagccccagtgactttatgcatcttataaccaagaagccttcagtagagcaagtctgagccagaggttttatcacactttgcctcagggtccaccaggaaccagg

SEQ ID NO: 200 - DNA, 2306 bp, Homo sapiens
cagtggaaagagtggaacgagaaaacctttcagactattgtgttctgggccagcgtccaatgcatttaccaaatatgaaccagctggcatccctggggaaaaccaacgaacagtctcctcacagccaaattcaccacagtactccaatccgaaaccaagtgcccgcattacagcccatcatgagccctggtcttctttctccccagcttagtccacaacttgtaaggcaacaaatagccatggcccatctgataaaccaacagattgccgttagccggctcctggctcaccagcatcctcaagccatcaaccagcagttcctgaaccatccacccatccccagagcagttaagccagagccaaccaactcttccgtggaagtctctccagatatctaccagcaagtcagagatgagctgaagagggccagtgtgtcccaagctgtctttgcaagagtggcattcaaccgcacacaggtacaattagcattaaacactgtaattaacagtaatactggggacagaattgagataggttataattatttttatctctttaaaaagctttatggatctcaggacatagaattagattaattaataatccttagttaatgaaacgctattaccattgatccatgcatgaccatgattaattaactaattgattaattttgatgaggtaatggacatctttgagcccaacatgcaactcaggaccccaaatgttactaatgacttgggtatgtactctctcatcctctccatttactgtttccagatgtaaccctgatcttgaattttgtgattatcagtctcttgccattttttaaaacaaatcataaaactatgcatgcccagacaatctatttttttcccttggttttgaacgttataaaagaaataaaattatgttttataattttataagtaaagttttatttaaaaatttataaaaatccttcaaaacataaaagttagatttaagatattgataaaatgataatggatagtttacttttatttttaatgtttgagagaattatatgccaattataacactaaatgttgaaaatgtaaacagttaattcacacgtcttatttttattgagggtgcttatatgtaagacattcttttctgctagtagttcttaaactggagtgtgcatcagaatcacctggagggctgtgaaacacagactgctgggcctcatcccatagtttctgattgagtaagtctgaggttggactcagaaatggacatttctaacaagatcccaggtgattatgatggtactgatccggggccgcatgttgagaaaaacttacctagcccttatatgagtaagaacaaagcagatgggcataatctcggggagctaacgatctagtggtgaaaaccaggtaaccagataattagagtaaaatgtgaagtgttatgagtaatgttggagagtgtaagcaatagttgtggtggaggttcatggtgagctggaggtgaggaatacttccaggagaatgaatatggtaagccttcaagaaaacagtagattaaaatttcagcaccctcgtaaatgcaaggcaggaagctaagctctatgtgggtgcaaagaggaaaaagataatgggcaagcacatatgtaaacaacagagtattaggttgtcaatgggttagaccttgaaggattaataaagtacagcaggcaaagatgatgaagaagaagattattattttaaggtaaagacattcataggaaagatgttgagttaaaaaatgcaggaataatttgaagacataaaacaactgatttctgagaaaaaccctgtgaacgtacagaatgtaggaatgctttcatttatctgatacctgttcagagacacatgataacacacgctgtagatggaccttacaaatgaaagaaagcatgctggattgaaacctcaataatttggaaaatacaggaatgtttccaaatttaatgattacttcagaagttaaggggctgggcacagtggctcatgtctgtagtcctagcactttgggaggccaaggtgggcggatcacttgaggtcaggagttcaagaccagcctgggcaagatggtaaaacaccatctctactaaaacagaacaaaacaaaaaaattagctgggcgtggtgatgcgtgcctgtagtctcagctactcaggaggctgaggcagaagaatcccttgaacccaggaggcggaggctgcagtgggccgagatcatgccactgcactccagcctgagtgagagtgaaactccatctcaaaaaaaaaaaaaaaaa

SEQ ID NO: 201 - DNA, 4203 bp, Homo sapiens
tgacaacatggcggcgcccatggtccgtggcccggcagtgctcgcctaaaggtggagaacgaggagtagaggaggccgcagccagagcctgtgagcagatccagacctacagataaaaaacattatttaatctatctgggatttactccggcttatgatttgagggccttctcaccttctgaagaatggcttctgtttggcagagattgggtttttatgcctctcttctgaaaagacagctaaatggtgggccagatgtcatcaagtgggaaaggagagtaattcccggatgtaccagaagcatctacagtgccacgggaaagtggacaaaagagtatacattgcagacaagaaaggatgttgagaaatggtggcatcaacgaataaaagaacaggcctccaaaatttcagaagctgataaatcgaagccaaaattttacgtgctttccatgttcccttatccttctggtaagctgcacatgggccatgtgcgtgtctacaccatcagcgacaccatagcacggttccagaagatgagagggatgcaggtcatcaaccccatgggatgggatgcttttggattgcctgctgaaaatgccgcagtcgagaggaatctacatccacaaagttggacacaaagtaatattaaacacatgaggaaacagcttgatcgtctgggcctgtgtttcagctgggatagggaaataactacgtgtttgccagattactacaagtggactcagtatctctttattaaactgtatgaggctgggctggcctatcaaaaggaggccctggttaactgggacccagtggatcaaacagtgcttgccaatgagcaggtggatgaacatggctgttcatggcgttctggagcaaaggtggaacagaagtacctcagacaatggtttattaagacaaccgcttatgcaaaggccatgcaggacgcgttggcagaccttccagaatggtatggaataaaaggcatgcaagcccactggattggggactgtgtgggctgccacctggacttcacattaaaggttcatgggcaagccacgggcgaaaagctgactgcctatacggccacccctgaagccatttatggcacctcccacgtggccatctcgcccagccacagactcctacatgggcacagctctctgaaggaagccttgaggatggcccttgtccctggcaaagattgcctcacgcctgtaatggctgtgaacatgcttacccagcaggaggtccctgtcgttattttggccaaagctgacttggaaggctctctggattcaaaaataggaattcccagtactagctcagaggacaccatcttagcccaaaccctgggcctggcctactctgaagtcattgaaactttgccagatggcacagagagactgagcagctctgctgagttcacaggtatgacccggcaggatgcttttctagccctgactcagaaagcccgggggaagagagtgggtggagacgtgacaagtgataaactgaaagactggctgatttcacggcagcggtactggggcacaccaatccccattgtccactgcccagtctgtggccccacacctgtgcccctggaggacttgcctgtgaccctgcccaacatcgcgtctttcactggcaagggaggccccccactggccatggcttcagagtgggtgaactgctcctgcccaaggtgcaagggagcagccaagagagagacagacacgatggatacctttgttgattctgcttggtactacttcagatacactgaccctcataatccacacagcccttttaacacagcagtggccgattactggatgcctgtggatttgtacattggagggaaagaacatgccgtcatgcacttgttctatgcaagattctttagtcatttttgccatgatcaaaaaatggttaaacatagggagccttttcataagctgctggcccaaggccttatcaaggggcagacattccgcctaccatctggacagtatctacagagagaggaagtggatctcacaggttccgttcctgttcatgcaaaaacgaaagagaagttagaggtgacgtgggagaagatgagtaagtccaaacacaacggggtggacccagaggaagttgtggagcagtatgggatcgacacgattcggctctacatcctttttgctgcccctcctgagaaggatatcttgtgggatgtgaaaactgatgctctccctggggtgctgagatggcaacaacgactgtggaccttgacaactcggtttattgaggccagggcttctgggaagtctccccagcctcagctgctgagtaacaaggagaaagctgaggccaggaagctctgggagtacaagaactccgtcatctctcaggtgaccacccatttcacagaggacttctcactgaattctgcaatttctcagctgatgggactcagcaatgccctctcgcaagcctctcagagcgtcattctccacagccccgagtttgaggatgctttgtgtgccctgatggtaatggctgctccactggcccctcatgtaacctcagagatctgggcaggcctggcgctggtgccgaggaagctctgtgcccactacacttgggatgccagtgtgctgctccaggcatggcctgctgtggacccggagttcctgcagcagcctgaggttgtccagatggcagttctgatcaacaataaagcttgtggcaaaattcctgtgccccaacaagttgcccgggaccaggacaaagtccacgaatttgttcttcaaagcgagctgggtgtcaggcttttgcaaggacgaagcatcaagaagtccttcctttccccgagaactgccctcatcaacttcctggtgcaagattgacagccaggaggctgcagctaccacgagggcctctgaggaacctccttccaggcctgggatgagggggcgatgtctgctggcccaggggaagggaaaagacaaatgtcttgactgttgacctcggtcctgtggcagactgcagtcaacagtgtgcctctgtagtgtggcctggtgctggggtgaaggtgagctgggcaaaggagaaatatgagctactgaggagggggttggacatcctgcccctcaccccccacccacactgcaggtagaggaggccatctgatcccatgggaagccatcagagacactgctggtgggagcaggaaggagcagtgcccctcgagcagccaggaagcctgcggatctgggaaatggctctgccttaggcacttctcgggaatttgaggccagcctgaggaactgcaggactcaggtgcaatgtgccagccacttggaactgctaactgagcctccagatggtagtgaatggtctctttgccttcaggctggatgaggaagtcatttaggaaatgttcaaataaccaatatgtggaaatggacacagggatcttctgaagttgctttgaatcaaaaggcaggcagtgctggttcctctgcctgtgtccccaccactccccagctctgtcatgcaggcctgtcctccccaaccccagctggatgtgcctcccaggcctgctgtggttctgacacacaggatcccaggcaaggcaccacttcctcacatgaatgaggagcagcaagtcataaccactcccttgggtatacaatttgctgtgtagtgaagtggaaccaggctcaggctgctggtcccaacctcagagccccaccgcagcccagtagggatgcagcacgccccagagggctcatgtgggccccagatggcaatgccaccattgttgatgtgactccagagccagttattaggaagagcaagctcaccacagaggagtggaactgaggccccccagatgttgcctccggtgtccaagccacagcggtctggctgttgggaagatggccaggaatggactcataccattggcacattaggctaatcctggttttatgtgaagtcagcaattaagtgttcccactagaactgacctaagccactgattaatatttaatgagggaaggtaggggagaatctagccattttataatgccagaaatctatatatgttatctgatgccatttttctgaagtagcctcacatgtggtccccctgcagttcagcagttaacagatgacttttttagtgtaataaaatgtttatcatctatg

SEQ ID NO: 202 - DNA, 718 bp, Homo sapiens
  misc_feature (216)..(216): n is a, c, g, or t
  misc_feature (459)..(459): n is a, c, g, or t
  misc_feature (706)..(706): n is a, c, g, or t
tttttttttttttttttgagaattaggacagtttattgtttgaccaacatgctgagtcttttccacattttacacagtttaatgtgaaatcaacatggcggctatgtcttctgagcccataacaaatggaattgccaccctttgtgctcctcacagccaatcactttaaagggatgggtgaggggaaagtgaggggagaagtggacacacaccccnagaatgcggctggccttcaatgctatggaggcttcccacctcctgaaggaaccatctaaacccctgctgcaaggatttcctgatgaaaccacacactgctgggagtgccaaccaaacaggggtctggagtccaaggagtttgcacattgagatcccaaggttttggaacacctaaatagttcatgtcaaacaaaaattcaaagggtgtcctgatctgtgtgggtgcccatgacaatcaatcanagtaaacttggggactggcccttgtgcagtagaggagcccaaaataccaccaatattctcactcatatgctgggaagaacctagtgtcctaaccaaaaagagtagagatggtctgaggaacacacccacccatagcagtccctgctgtgtaataaatatgagtcacatttgttccacaccaggcagcaatgggataaaaatgggaaccttaactgttctgatcacttgtaaataagctggttgcttnttccctcgtgcc

SEQ ID NO: 203 - DNA, 550 bp, Homo sapiens
gacaatttagctcaattttaatgtttcccaagcattattttgaccaggtacccaggtttaagttatgaacattgacagtgtccattatataaccacacttgaagttatttaggacttaaccattttctaatattagcctattttctacactgcttttcacatatatgcccattaacaaatggaatgtctgttacatttattggtttgtgaatgtttctggaaaactgcagtatatgtgaagaccaatttccatgctggcattgcatgcatccaaatattaatgcacagaggcacagaattagagcaacaagagagcatattcaaacactagcacaccccattcccctttttattgcttgtttgcttagtacttcttaaaacaaaagacttgaattcaacgttcaactaccaaagagagtaacagcagggcacatactcagggctcgaatgaaactgtaagcactagctggagcaaaacagttagacattggtttatattaatatatgtatatatgaccttattaactaaaactcttctcaaccagggcct

SEQ ID NO: 204 - DNA, 657 bp, Homo sapiens
cggagatcacgtttgatagaccacctgcccgacgtccctttgatccaaatgatagatgctatgagtgtggcgaaaagggacattatgcttatgattgtcatcgttacagccggcgaagaagaagcaggtcacggtctagatcacattctcgatccagaggaaggcgatactctcgctcacgcagcaggagcaggggacgaaggtcaaggtcagcatctcctcgacgatcaagatctatctctcttcgtagatcaagatcagcttcactcagaagatctaggtctggttctataaaaggatcgaggtatttccaatccccgtcgaggtcaagatcaagatccaggtctatttcacgaccaagaagcagtcgttccccatcaggaagtcctcgcagaagtgcaagtcctgaaagaatggactgaagctctcaagttcaccctttagggaaaagttatttgtttacattattataaagggattgtgatgtctgtaaaggtgtaacctaggaaagataattcaacatctaatcaaaatggatctggattactatgtaaattcacagcagtaagataatataaattttgttgaatgtattaacatcatatggtctgaaaaatgtgggtctttatttggcacatttacaatcacatgtttcta

SEQ ID NO: 205 - DNA, 879 bp, Homo sapiens
ctcctcacagaagcctggagctgggcatccaagaagaagcagcctcatttgttttctggtgtcatcgtaggtggccacctatggcttttgggaatgtaaaaagggcagctctctggcatgttcctgactgaggatctcataacatttaacttgaggaacttcctccttttccagctttgggagtcaagcttctcacctggggcgggtgggttctgcaccaccctcccaccctccttcctccgtgtggacgatagagccacatccagcaccacggacagctcccgggcgccttcatctcctcgtcctccaggcagcacaagccattgtggaatctccaccaggtgtacagaacggtgcctctgcgtcctgccactcaggacctctcaagtccccgatgtgatggctcctcagcatgatcaggagaaattccatgatcttgcttattcctgtcttgggaagtccttctccatgtctaaccaagatctatatggctatagcaccagctctttggctcttggcttggcatggctaagttgggagaccaaaaagaagaatgtacttcatctggttgggctggattccctctgataagccttcccagttgactgaaagatgaggctaggctctagcaagttgaagtcaaaccagctccttcaagaagctttgagcagaatgaagtggggaggacccagcttccagcccaggaagcccactgtacctggagccatctgggataagactttgacccatgactcccatatccacagcctgtccatcctagcccatcccagtttatcctgtatcatttgagctgggattcccacatcctctgagttggaagtcccatctcaagtcttcaataaagactcttgaatattg

SEQ ID NO: 206 - DNA, 2524 bp, Homo sapiens
ggtgattgaacaagaaaagcttgaagctcaagattcaggagaagaggctaggaatctttcatttaatgagttatatccctctggaacacttaagcttcagtacaattttgatactattgaccaacagttttgtgacttagctgataacaaagacactgctgaatgtgacattgctgaagtagatggggaactttttgtggctcaaagcaactttaccttgatattggaaggtgaagaaggagaagttgagccaggtgattttgcatcatctgatgtgttacctaaagcagctaacacagcaactgaagaaaaacttgtatgcagtggggaaaatgataatcatggacaaattgcaaatttgccatctgccgtaactagtgaccaaaagtcccaaaaagtagacactttaccatatgtgcctgaacctattaaagtagcaattgcagaaaatttactagatgtaattaaagacacaagaagtaaagaaattacttcagatacaatggaacagtccattcatgaaacaatacctttagtgagccaaaacataatgtgtcccactaaattggtcaaatctgcatttaagactgctcaggaaacaagcacaatgactatgaatgtcagccaggttgatgacgtggtttccttcaaaactcgtacgagaggtcaacgtatccaaaacgtgaatgtcaaatcagcacaacaggaagcatcagcagatgttgctactcctaagatgccagggcagtcagtcaggaagaaaactaggaaggcaaaagaaatttctgaagcttctgaaaacatctattctgatgtcagaggactatctcagaaccagcaaatacctcaaaattctgttacgcctaggagaggaaggagaaagaaagaagttaatcaggacatactagaaaacaccagttctgtggaacaagaattacagatcactacaggtagggaatcaaaaagattaaaatcatctcagctgttggaaccagcagttgaagaaactactaaaaaagaagttaaggtttcatctgttacaaaaaggactcctagaagaattaaaagatctgtagaaaatcaggaaagtgttgaaattataaatgatctaaaagttagtacggtaacaagtcctagcagaatgatcagaaaattgagaagtactaatttagatgcttctgaaaatacaggaaataagcaagatgataaatccagtgacaagcagctgcgtattaaacatgttagaagggtcagagggagagaagttagtccatcagatgtgagagaagactccaaccttgagtcatctcagttgactgttcaagcagaatttgatatgtctgccatacctagaaaacgtggtagaccaagaaaaatcaatccatctgaagatgtaggatctaaggctgttaaggaagagagaagccccaagaagaaagaagctcccagcattagaaggagatctacaagaaataccccagctaaaagtgaaaatgttgatgttggaaaaccagctttaggaaaatccattttagtgccaaacgaggaactttcgatggtgatgagctctaagaaaaaacttacaaaaaagactgaaagtcaaagccaaaaacgttcattgcactcagtatcagaagaacgcacagatgaaatgacacataaagaaacaaatgagcaggaagaaagattgctcgccacagcttccttcactaaatcatcccgcagcagcaggactcggtctagcaaggccatcttgttgccggacctttctgaaccaaacaatgagcctttattttctccagcgtcagaagttccaaggaaagcaaaagctaaaaaaatagaggttcctgcacagctgaaagaattagtttcggatttatcttctcagtttgtcatctcacctcctgctttaaggagcagacaaaaaaacacatccaataagaacaagcttgaagatgaactgaaagatgatgcacaatcagtagaaactctgggaaagccaaaagcgaaacgaatcaggacgtcaaaaacaaaacaagcaagcaaaaacacagaaaaagaaagtgcttggtcacctcctcccatagaaattcggctgatttcccccttggctagcccagctgacggagtcaagagcaaaccaagaaaaactacagaagtgacaggaacaggtcttggaaggaacagaaagaaactgtcttcctatccaaagcaaattttacgcagaaaaatgctgtaatttcttgggaagattttaatgtacacctatttgtaaagtcatcagaatagtgtggattattaaatatctagtttggaagaaaataatttatataaattattgtaaatttttatgtaaacagaaggtcttcaataagtaaagtaactccatatggagtgattgtttcagtccaggcaatttttctattttatattaagacttcatacatttatatatgtaaatatggcttattaatggaatgttaaataaaatgtatacttcacaaaaaaaaaaaaaaaaaaaaaa

SEQ ID NO: 207 - DNA, 2311 bp, Homo sapiens; identical to SEQ ID NO: 167

SEQ ID NO: 208 - DNA, 3613 bp, Homo sapiens
atgcctcacttcaccgtggtgccagtggacgggccgaggcgcggcgactatgacaacctcgaggggctcagttgggtggactacggggagcgcgccgagctggatgactcggacggacatggcaaccacagagagagcagcccttttctttcccccttggaggcttccagaggaattgactactatgacaggaacctggcactgtttgaggaagagctggacatccgcccaaaggtatcgtctcttctgggaaagctcgtcagctacaccaacctcacccagggcgccaaagagcatgaggaggccgagagtggggagggcacccgccggagggcagccgaggcacccagcatgggcaccctcatgggggtgtacctgccctgcctgcagaatatctttggggttatcctcttcctgcggctgacctggatggtgggcacagcaggtgtgctacaggccctcctcatcgtgcttatctgctgctgttgtaccctgctgacggccatctccatgagtgccatcgccaccaacggtgtggttccagctgggggctcctatttcatgatctctcgttcactggggccagaatttggaggtgctgtgggcctgtgcttctacctgggaacaacattcgcagcagccatgtacatcctgggggccatcgagatcttgctgacctacattgccccaccagctgccattttttacccatcgggtgctcatgacacgtcgaatgccactttgaacaatatgcgtgtgtatgggaccattttcctgaccttcatgaccctggtggtgtttgtgggggtcaagtatgtgaacaaatttgcctcgctcttcctggcctgtgtgatcatctccatcctctccatctatgctgggggcataaagtctatatttgaccctcccgtgtttccggtatgcatgctgggcaacaggaccctgtcccgggaccagtttgacatctgtgccaagacagctgtagtggacaatgagacagtggccacccagctatggagtttcttctgccacagccccaaccttacgaccgactcctgtgacccctacttcatgctcaacaatgtgaccgagatccctggcatccccggggcagctgctggtgtgctccaggaaaacctgtggagcgcctacctggagaagggtgacatcgtggagaagcatgggctgccctccgcagatgccccgagcctgaaggagagcctgcctctgtacgtggtcgctgacatcgccacatccttcaccgtgctggtcggcatcttcttcccttctgtaacaggcatcatggctggctcaaaccgctctggggaccttcgtgacgcccagaagtctatccctgtggggaccattctggccatcattacaacttccctcgtgtacttcagcagtgtggttctctttggtgcctgcattgagggtgtggttctccgggacaagtatggcgatggtgtcagcaggaacttggtggtgggcacactggcctggccttcaccctgggtcatcgtcatcggctccttcttttcaacgtgtggcgctggcctccagagcctcacaggggcaccacgcctattgcaggccattgccaaggacaacatcatccccttcctccgggtgtttggccacgggaaggtgaatggtgaacccacatgggcactcctcctgacggcactcatcgccgagctgggcatcctcatcgcctccctcgacatggtggcccccatcttatccatgttctttctgatgtgctacctgttcgtgaacctcgcctgtgcggtgcagacactcctgaggacccccaactggcggccccggttcaagtactatcactgggcgctgtccttcctgggcatgagtctctgcctggcccttatgtttgtctcctcctggtactatgccctggtggccatgctcatcgccggcatgatctacaaatacatcgagtaccaaggggctgagaaggagtggggtgacgggatccgaggcctgtccctgagcgctgcccgctacgcgctgttgcggctggaggaggggcctcctcacaccaagaactggcggccgcagctgctggtgctgctgaagctggacgaggacctccacgtgaagtacccgcggctcctcaccttcgcctcccagctcaaggctggcaagggcctgaccattgttggttctgtcatccaggggagcttcttggagagctatggcgaggctcaggccgccgagcagaccatcaagaacatgatggaaattgagaaggtgaagggcttctgccaggtggtggtggccagcaaggtgcgggaggggctggcccacctcatccagtcctgtggcctgggaggcatgcggcataactccgtggtgctgggctggccctacggctggcgacagagcgaggacccccgtgcctggaagaccttcattgacaccgtgcgctgcactacggctgcccacctggccctgctcgtgcccaagaacatcgccttctaccccagcaaccacgagcgctacctggagggccacatagacgtgtggtggatcgtgcacgatggtggcatgctcatgcttctgcccttcctgctgcgccagcataaggtctggaggaagtgccggatgcgcatcttcacagtggcccagatggatgacaacagcatccagatgaagaaggacctggctgtctttctgtaccatctgcgccttgaggccgaggtggaggtggtggagatgcataacagtgacatctctgcatacacctacgagcggacgctgatgatggagcagcggtcgcagatgctgcggcagatgagactgaccaagactgagcgggagcgagaagcccagctggtcaaggatcggcactcggccctgcggctggagagcctgtactcggacgaggaagatgagtctgcagtgggggctgacaagatccagatgacgtggaccagggacaagtacatgactgagacctgggaccccagccatgcccctgacaatttccgggagctggtgcacattaagccggaccaatccaatgtgcggcgcatgcacactgctgtgaagctcaatgaagtcattgtcacgcgctcccacgacgcccgcctggttctcctaaacatgcctggcccacccaggaacagtgagggcgacgagaactacatggagttcctcgaggtgctgaccgagggccttgagcgggtgctgttggtgcgcggtggtggccgtgaagtcatcaccatctactcctgagcccagtgtcatcttgtggcctggagtcgaggtcttggccaggacataacaagctgtggtctggggtaacagcctcttcccagcacccacctgccagccctgcttgcctggccctgtcctggacccagctttgctaggtctccttggaaaccaggcctgggcctcaaaatggagatggatcccaggtcttgtgggaccctgggatgtttggggactttactatctagcaccccagtaggcctgtcctggccagagaagactggtaggggccgagtggggtttgaaggcagccggcccggcccagcccaggagcgctatttattgcatatttattgtttggatgtcaccatcagag

SEQ ID NO: 209 - DNA, 3957 bp, Homo sapiens
cccaggagctgaatcacaattccagagactttggccagctggctgtggagctcctggaccagtcctacaagcaggacgaacagctggccatgaaactgctgacgtatgagctgaagaactggagcaacgccacgtgcctgcagcttgccgtggctgccaaacaccgcgacttcatcgcgcacacgtgcagccagatgctgctcaccgacatgtggatgggccggctccgcatgcgcaagaactcaggcctcaaggtaattctgggaattctacttcctccttcaattctcagcttggagttcaagaacaaagacgacatgccctatatgtctcaggcccaggaaatccacctccaagagaaggaggcagaagaaccagagaagcccacaaaggaaaaagaggaagaggacatggagctcacagcaatgttgggacgaaacaacggggagtcctccaggaagaaggatgaagaggaagttcagagcaagcaccggttaatccccctcggcagaaaaatctatgaattctacaatgcacccatcgtgaagttctggttctacacactggcgtatatcggatacctgatgctcttcaactatatcgtgttagtgaagatggaacgctggccgtccacccaggaatggatcgtaatctcctatattttcaccctgggaatagaaaagatgagagagattctgatgtcagagccagggaagttgctacagaaagtgaaggtatggctgcaggagtactggaatgtcacggacctcatcgccatccttctgttttctgtcggaatgatccttcgtctccaagaccagcccttcaggagtgacgggagggtcatctactgcgtgaacatcatttactggtatatccgtctcctagacatcttcggcgtgaacaagtatttgggcccgtatgtaatgatgattggaaaaatgatgatagacatgatgtactttgtcatcattatgctggtggttctgatgagctttggggtcgccaggcaagccatcctttttcccaatgaggagccatcatggaaactggccaagaacatcttctacatgccctattggatgatttatggggaagtgtttgcggaccagatagaccctccctgtggacagaatgagacccgagaggatggtaaaataatccagctgcctccctgcaagacaggagcttggatcgtgccggccatcatggcctgctacctcttagtggcaaacatcttgctggtcaacctcctcattgctgtctttaacaatacattttttgaagtaaaatcgatatccaaccaagtctggaagtttcagaggtatcagctcatcatgactttccatgaaaggccagttctgcccccaccactgatcatcttcagccacatgaccatgatattccagcacctgtgctgccgatggaggaaacacgagagcgacccggatgaaagggactacggcctgaaactcttcataaccgatgatgagctcaagaaagtacatgactttgaagagcaatgcatagaagaatacttcagagaaaaggatgatcggttcaactcatctaatgatgagaggatacgggtgacttcagaaagggtggagaacatgtctatgcggctggaggaagtcaacgagagagagcactccatgaaggcttcactccagaccgtggacatccggctggcgcagctggaagaccttatcgggcgcatggccacggccctggagcgcctgacaggtctggagcgggccgagtccaacaaaatccgctcgaggacctcgtcagactgcacggacgccgcctacattgtccgtcagagcagcttcaacagccaggaagggaacaccttcaagctccaagagagtatagaccctgcaggtgaggagaccatgtccccaacttctccaaccttaatgccccgtatgcgaagccattctttctattcggtcaatatgaaagacaaaggtggtatagaaaagttggaaagtatttttaaagaaaggtccctgagcctacaccgggctactagttcccactctgtagcaaaagaacccaaagctcctgcagcccctgccaacaccttggccattgttcctgattccagaagaccatcatcgtgtatagacatctatgtctctgctatggatgagctccactgtgatatagaccctctggacaattccgtgaacatccttgggctaggcgagccaagcttttcaactccagtaccttccacagccccttcaagtagtgcctatgcaacacttgcacccacagacagacctccaagccggagcattgattttgaggacatcacctccatggacactagatctttttcttcagactacacccacctcccagaatgccaaaacccctgggactcagagcctccgatgtaccacaccattgagcgttccaaaagtagccgctacctagccaccacaccctttcttctagaagaggctcccattgtgaaatctcatagctttatgttttccccctcaaggagctattatgccaactttggggtgcctgtaaaaacagcagaatacacaagtattacagactgtattgacacaaggtgtgtcaatgcccctcaagcaattgcggacagagctgccttccctggaggtcttggagacaaagtggaggacttaacttgctgccatccagagcgagaagcagaactgagtcaccccagctctgacagtgaggagaatgaggccaaaggccgcagagccaccattgcaatatcctcccaggagggtgataactcagagagaaccctgtccaacaacatcactgttcccaagatagagcgcgccaacagctactcggcagaggagccaagtgcgccatatgcacacaccaggaagagcttctccatcagtgacaaactcgacaggcagcggaacacagcaagcctgcgaaatcccttccagagaagcaagtcctccaagccggagggccgaggggacagcctgtccatgaggaaactgtccagaacatcggctttccaaagctttgaaagcaagcacacctaaaccttcttaatatccgccacagaaggctcaagaatccagccctaaaattctctccaactccagtttttcccctttccttgaatcatacctgctttattcttagctgagcaaaacaagcaatgctttgggaggtgttaactcaaaggtgacttctgggccacagatcaagaaagcatttgatctgacccagtgccagacacaggggatttaaggcatgttcacacttgctgggcagggagggggaagagagggagaaggaagggttagagatgaatgtgtatccgcagtcacagcagaaagccatgagagcaggggaaacaaggggcttcgagcacgctccatgccaggaggcatctgttgatttctgaccattatcaagagttgtaggatgcagggctaaattgcaaaataaaataaaatagccagcgtacacaatgagatattctaaacttccattctgttttcttttcacattggctccatcactggtgactgatgaagagcatcctctttattcagtataagccggcagcaagcagttctacctaacgtcccacatccttctcatgccaacacttctgtaattgatcattataaagaaaaaacaaggtaacagtcatagttcacctgtctcttatctattcacttctggtgccacaactgtttatccttttttgaagaaaataagggaacagaaatgcctttttgtattgcaatcgaaatgaaagaagagttgatgttaaaaaaacaaaagtcaagtgatttattatatacagtgggcgttcaagtctagtcgagcaagctcaggagaatgtaattaaataattttatattttttaatttattttgtatctcacctgtcatggatgaattcattcactgaatatgtaatattgaactt

SEQ ID NO: 210 - DNA, 2904 bp, Homo sapiens
ggaaactggcggtggccgcggccgccgagtcggtctgcgcatcctcctgcgttttctcgcttggatcttggcactgagaggcggtggccggcgggatggagaaaagtaggatgaacctgcccaaggggccggacacgctctgcttcgacaaggacgagttcatgaaggaagatttcgatgtcgatcattttgtgtctgactgtaggaagcgggtccagctggaagaactgagagatgacctggagctctactataaacttcttaaaacagccatggtcgaactcatcaacaaggattatgcagattttgtcaatctttcaacaaacttggttggcatggacaaagccctcaaccagctttctgtgcctttgggacaattacgagaagaggttctgagccttagatcgtctgtcagtgaaggaattcgggcagttgatgaacgaatgtctaaacaagaggacattaggaaaaaaaagatgtgtgtattgaggcttatacaagttattcggtcagttgagaaaattgaaaaaatcttaaactctcaaagttctaaagaaacctctgcactagaagcaagcagcccccttttgactggacaaattttggagagaattgccacagaatttaatcagttacagtttcatgctgttcaaagcaaaggcatgcctcttttggacaaagtaagaccgcgtatagctggcattacagccatgttacagcagtcactggaaggtctcctattagaaggccttcagacgtctgacgtcgatataatacggcactgcttgcggacttacgccacgattgacaagacacgggacgcggaggccttagttggccaagtactagtgaaaccatacatagacgaggtgattatagagcagtttgttgaatctcatcccaatggccttcaggtcatgtataataaactcctggagtttgttcctcaccattgccgccttcttcgagaagtcacaggaggtgccatctccagtgaaaaaggcaatactgttcctggatatgactttttggtgaattctgtttggccacaaatagtacaaggattagaagaaaagttaccctcgctttttaatcctgggaatcccgatgcatttcatgagaaatataccataagtatggattttgtcagaagattggaacggcagtgtggatcacaggctagtgtaaagagattaagagcccatcctgcctatcacagcttcaataagaagtggaacttgcctgtttattttcaaataagatttagagaaatagcgggatccttagaagcagcacttacagatgtcctggaagatgccccagctgaaagtccgtattgccttttggcttctcatagaacttggagcagccttaggaggtgttggtcagatgagatgttcttgccattactggtgcatcgcctgtggagactcactctgcagattttggcacgatactctgtgtttgtcaatgagctttcactcaggcccatttctaatgaaagtcccaaggagatcaagaaacctttggtaactggtagcaaagaaccttccatcacccaaggaaacactgaagaccaaggaagtggtccttcggaaacaaagcctgtggtttccatttcccgcactcagctcgtgtatgtggttgcagacctggacaagcttcaggagcagcttccagaactcttggaaataatcaagccaaaacttgaaatgattggctttaagaatttttcttctatctcagcagccctggaggactcccagagctctttttcagcctgtgtgccctccttgagtagcaagatcatccaggatttaagtgactcttgcttcggtttcctaaaaagcgccctggaggttcccaggctttaccgaagaaccaataaggaggtcccaaccacagcttcctcctatgtggacagtgctctgaagcccttattccagcttcagagcggacacaaggataagctcaaacaagcaataattcagcagtggctagaaggcactctcagtgaaagcactcataagtactatgaaaccgtgtcagatgtattaaactctgtgaagaagatggaagagagcctgaaaaggctgaaacaagccagaaaaaccactcccgccaaccccgtcggtcccagtggtggcatgagcgacgacgacaaaatcaggctgcagttggccctagatgttgagtacttgggagagcagatacaaaagttgggactacaagcaagtgacataaaaagcttctcagctctcgcagagcttgttgctgctgccaaggaccaggcaacagcagagcagccttaagcatcttggaagatcccgaggttagattcttaagcaagagaagagttggacttccaggctgaaggggagaaagtgactctgttctcttagcaaccgtctgtagcaaagaagtgcttccagcatcactccagcaacacgcccatgcgtcttctctcagcgtatttgggtcttctttgcccaaaagaacacaaaagcctttttccattgtatggaagatagtttttaagacatttgaaactttctactatagtttacagaacaaattattttatttttattgtaaatcttagtgtggaagagctgatttctaaaatatgattaaagtaaatatatacctatgaatatcaagagtcgtctccctgagcctgtagttggaagtgacgactgtaatggaatgatgtcttgtatagaaatgcccttctctgaaataaagagaactcctgggctttctaaagaggctgcgggaagccatcctccactcccactgtgtgtgagagcagtgcttctgatcctgctgtcaccccgacctctggcaggagccggcgccagtaggaaagacctccttcctaaataaaagaagtgtctcccaaaa

SEQ ID NO: 211 - DNA, 4412 bp, Homo sapiens
cttcccagtgggactccagcagggcgtcgtggtctgtgcggtgtctcccaaaccactacctggctgcccccgtaccagctgctgggaaagactacttcctccgagttgtgccggcctccgcgttctcctcacctcccctctcctccggacctccgccccctcgcggagaggccttgccgctttaagagccgggctagcgattgacaagcaataaacgctgagcgcccggctgcgctggagccgcccggagctaggggcttcccggggcgcaggagagacgtttcagagcccttgcctccttcaccatgccggttgccgccaccaactctgaaactgccatgcagcaagtcctggacaacttgggatccctccccagtgccacgggggctgcagagctggacctgatcttccttcgaggcattatggaaagtcccatagtaagatccctggccaaggcccatgagaggctggaggagacgaagctggaggccgtgagagacaacaacctggagctggtgcaggagatcctgcgggacctggcgcacgtggctgagcagagcagcacagccgccgagctggcccacatcctccaggagccccacttccagtccctcctggagacgcacgactctgtggcctcaaagacctatgagacaccaccccccagccctggcctggaccctacattcagcaaccagcctgtacctcccgatgctgtgcgcatggtgggcatccgcaagacagccggagaacatctgggtgtaacgttccgcgtggagggcggcgagctggtgatcgcgcgcattctgcatgggggcatggtggctcaacaaggcctgctgcatgtgggtgacatcatcaaggaggtgaacgggcagccagtgggcagtgacccccgcgcactgcaggagctcctgcgcaatgccagtggcagtgtcatcctcaagatcctgcccagctaccaggagccccatctgccccgccaggtatttgtgaaatgtcactttgactatgacccggcccgagacagcctcatcccctgcaaggaagcaggcctgcgcttcaacgccggggacttgctccagatcgtaaaccaggatgatgccaactggtggcaggcatgccatgtcgaagggggcagtgctgggctcattcccagccagctgctggaggagaagcggaaagcatttgtcaagagggacctggagctgacaccaaactcagggaccctatgcggcagcctttcaggaaagaaaaagaagcgaatgatgtatttgaccaccaagaatgcagagtttgaccgtcatgagctgctcatttatgaggaggtggcccgcatgcccccgttccgccggaaaaccctggtactgattggggctcagggcgtgggacggcgcagcctgaagaacaagctcatcatgtgggatccagatcgctatggcaccacggtgccctacacctcccggcggccgaaagactcagagcgggaaggtcagggttacagctttgtgtcccgtggggagatggaggctgacgtccgtgctgggcgctacctggagcatggcgaatacgagggcaacctgtatggcacacgtattgactccatccggggcgtggtcgctgctgggaaggtgtgcgtgctggatgtcaacccccaggcggtgaaggtgctacgaacggccgagtttgtcccttacgtggtgttcatcgaggccccagacttcgagaccctgcgggccatgaacagggctgcgctggagagtggaatatccaccaagcagctcacggaggcggacctgagacggacagtggaggagagcagccgcatccagcggggctacgggcactactttgacctctgcctggtcaatagcaacctggagaggaccttccgcgagctccagacagccatggagaagctacggacagagccccagtgggtgcctgtcagctgggtgtactgagcctgttcacctggtctttggctcactctgtgttgaaacccagaacctgaatccatccccctcctgacctgtgaccccctgccacaatccttagcccccatatctggctgtccttgggtaacagctcccagcaggccctaagtctggcttcagcacagaggcgtgcactgccagggaggtgggcattcatggggtaccttgtgcccaggtgctgcccactcctgatgcccattggtcaccagatatctctgagggccaagctatgcccaggaatgtgtcagagtcacctccataatggtcagtacagagaagagaaaagctgctttgggaccacatggtcagtaggcacactgccccctgccacccctccccagtcaccagttctcctctggactggccacacccaccccattcctggactcctcccacctctcacccctgtgtcggaggaacaggccttgggctgtttccgtgtgaccaggggaatgtgtggcccgctggcagccaggcaggcccgggtggtggtgccagcctggtgccatcttgaaggctggaggagtcagagtgagagctagtggccacagctgcagagcactgcagctcccagctcctttggaaagggacagggtcgcagggcagatgctgctcggtccttccctcatccacagcttctcactgccgaagtttctccagatttctccaatgtgtcctgacaggtcagccctgctccccacagggccaggctggcaggggccagtgggctcagcccaggtaggggcaggatggagggctgagccctgtgacaacctgctgttaccaactgaagagccccaagctctccatggcccacagcaggcacaggtctgagctctatgtccttgaccttggtccatttggttttctgtctagccaggtccaggtagcccacttgcatcagggctgctgggttggaggggctaaggaggagtgcagaggggaccttgggagcctgggcttgaaggacagttgccctccaggaggttcctcacacacaactccagaggcgccatttacactgtagtctgtacaacctgtggttccacgtgcatgttcggcacctgtctgtgcctctggcaccaggttgtgtgtatgtgtgtgcgtgtgcacgtgcgtgtgtgtgtgtgtgtgtcaggtttaatttggggaggaagcaaagggttttgttttggaggtcactctttggggcccctttctgggggttccccatcagccctcatttcttataataccctgatcccagactccaaagccctggtcctttcctgatgtctcctcccttgtcttattgtccccctaccctaaatgcccccctgccataacttggggagggcagttttgtaaaataggagactccctttaagaaagaatgctgtcctagatgtacttgggcatctcatccttcattattctctgcattccttccggggggagcctgtcctcagaggggacaacctgtgacaccctgagtccaaacccttgtgcctcccagttcttccaagtgtctaactagtcttcgctgcagcgtcagccaaagctggcccctgaaccactgtgtgcccatttcctagggaaggggaaggagaataaacagaatatttattacaaatgttagaatatatttcttatactaggaatctcatttgcatttgcatagactatacacatggggtggaaaggccaggcctgcccccatctcgttggtgtggctctgcgtatactacacactcattctcctgctcctcttttcccttagtcagtgtcctttcatcctgattcagctctgccttgcatcaccctcagcctaagggagtgggaaggaaatggggtgttttcttgctgacctgaggctatagggtcacttgccatttcctaccttctctgggggatttgagggtagaggcaggggaagatctgttgttgcagttgcttctgcccccttgatccaaatgaccatcatctctgatggagatgggttgggtacctggccttcatggcaccttcactgctagggatgctcaaggggcaggcctggggcccttccctcctgtctcttctcggtctttcctctctgagcagcctcctacctcccctgcctgagccctcactccacagccctcccaggtacctagcagaggctgtcagtccttggctcacctggaacagggctggggctgggttggaacaggtgtgtgcccccaccacagctctatgactctgttctccctccctgccattgtggactcttgtatttgagggacctcaagagagtgaggaccctaccatccactgtccatattcagtcccagccccagtgcgcttcctctgttccctccctcagccatccaattcttgagttttctcactgattggttttctttctttttccttggattaaatgtgaaagcaaag

SEQ ID NO: 212 - DNA, 2107 bp, Homo sapiens
atggacgcggcactgctccacagcctgctggaggccaactgcagcctggcgctggctgaagagctgctcttggacggctgggggccacccctggaccccgagggtccctactcctactgcaacacgaccttggaccagatcggaacgtgctggccccgcagcgctgccggagccctcgtggagaggccgtgccccgagtacttcaacggcgtcaagtacaacacgacccggaatgcctatcgagaatgcttggagaatgggacgtgggcctcaaagatcaactactcacagtgtgagcccattttggatgacaagcagaggaagtatgacctgcactaccgcatcgcccttgtcgtcaactacctgggccactgcgtatctgtggcagccctggtggccgccttcctgcttttcctggccctgcggagcattcgctgtctgcggaatgtgattcactggaacctcatcaccacctttatcctgcgaaatgtcatgtggttcctgctgcagctcgttgaccatgaagtgcacgagagcaatgaggtctggtgccgctgcatcaccaccatcttcaactacttcgtggtgaccaacttcttctggatgtttgtggaaggctgctacctgcacacggccattgtcatgacctactccactgagcgcctgcgcaagtgcctcttcctcttcatcggatggtgcatccccttccccatcatcgtcgcctgggccatcggcaagctctactatgagaatgaacagtgctggtttggcaaggagcctggcgacctggtggactacatctaccaaggccccatcattctcgtgctcctgatcaatttcgtatttctgttcaacatcgtcaggatcctaatgacaaagttacgcgcgtccaccacatccgagacaatccagtacaggaaggcagtgaaggccaccctggtgctcctgcccctcctgggcatcacctacatgctcttcttcgtcaatcccggggaggacgacctgtcacagatcatgttcatctatttcaactccttcctgcagtcgttccagggtttcttcgtgtctgtcttctactgcttcttcaatggagaggtgcgctcagccgtgaggaagaggtggcaccgctggcaggaccatcactcccttcgagtccccatggcccgggccatgtccatccctacatcacccacacggatcagcttccacagcatcaagcagacggccgctgtgtgacccctcggtcgcccacctgcacagctcccctgtcctcctccaccttcttcctctgggttctctgtgctgggcaggctctcgtggggcaggagatgggaggggagagaccagctctccagcctggcaggaaagagggggtgcggcagccaagggggactgcaagggacagggatgagtgggggccaccaggctcagcgcaagaggaagcagagggaattcacaggaccccctgagaagagccagtcagatgtctgcaggcatttgcccatcccagcctctctggccagggccttactgggcccagagcagagaaggacctgtccaacacacacagctatttatagtagcagacacagggctcccctgccctactcatggagccagcagccaggcaatggtgtggccctgcactggcccttggactccacactcagtggtgccctgcagttgggtgggttacgccagcaaaggatcagtttggctgccttatcccagggctgtcacctagagaggctcacttgtaccccaccctgttcctgtgtcccctccccagccatcctcccgccttgggggctccatgaaggatgcaggcttccaggcctggcttcctctcttgggagaccccttctctgcctagtccacagattaggcaatcaaggaagacgccatcagggaagccacatccttagtcaaccagttgcatcgtgcggggcaaaatgaggagcagaggcatggaggagggaggcgtgggatgggaatagcagaaccaccatgtcttcagtgattgaaactcataccccattgccctttgccctccagtctccccttcagaaacatctctgctctctgtgaaataaaccatgcctcttgg

SEQ ID NO: 213 - DNA, 777 bp, Homo sapiens
aggatcccaaggcccaactccccgaaccactcagggtcctgtggacagctcacctagctgcaatggctacaggctcccggacgtccctgctcctggcttttggcctgctctgcctgccctggcttcaagagggcagtgccttcccaaccattcccttatccaggctttttgacaacgctatgctccgcgcccatcgtctgcaccagctggcctttgacacctaccaggagtttaacccccagacctccctctgtttctcagagtctattccgacaccctccaacagggaggaaacacaacagaaatccaacctagagctgctccgcatctccctgctgctcatccagtcgtggctggagcccgtgcagttcctcaggagtgtcttcgccaacagcctggtgtacggcgcctctgacagcaacgtctatgacctcctaaaggacctagaggaaggcatccaaacgctgatggggaggctggaagatggcagcccccggactgggcagatcttcaagcagacctacagcaagttcgacacaaactcacacaacgatgacgcactactcaagaactacgggctgctctactgcttcaggaaggacatggacaaggtcgagacattcctgcgcatcgtgcagtgccgctctgtggagggcagctgtggcttctagctgcccgggtggcatccctgtgacccctccccagtgcctctcctggccctggaagttgccactccagtgcccaccagccttgtcctaataaaattaagttgcatca

SEQ ID NO: 214 - DNA, 2186 bp, Homo sapiens
gtgtggagcttctgagatctgtggaggtttttctctgcaaatgcaggaagaaatcaggtggatggatgcataattatggccctgctcctggtctctttgctggcattcctgagcttgggctcaggatgtcatcatcggatctgtcactgctctaacagggtttttctctgccaagagagcaaggtgacagagattccttctgacctcccgaggaatgccattgaactgaggtttgtcctcaccaagcttcgagtcatccaaaaaggtgcattttcaggatttggggacctggagaaaatagagatctctcagaatgatgtcttggaggtgatagaggcagatgtgttctccaaccttcccaaattacatgaaattagaattgaaaaggccaacaacctgctctacatcaaccctgaggccttccagaaccttcccaaccttcaatatctgttaatatccaacacaggtattaagcaccttccagatgttcacaagattcattctctccaaaaagttttacttgacattcaagataacataaacatccacacaattgaaagaaattctttcgtggggctgagctttgaaagtgtgattctatggctgaataagaatgggattcaagaaatacacaactgtgcattcaatggaacccaactagatgagctgaatctaagcgataataataatttagaagaattgcctaatgatgttttccacggagcctctggaccagtcattctagatatttcaagaacaaggatccattccctgcctagctatggcttagaaaatcttaagaagctgagggccaggtcgacttacaacttaaaaaagctgcctactctggaaaagcttgtcgccctcatggaagccagcctcacctatcccagccattgctgtgcctttgcaaactggagacggcaaatctctgagcttcatccaatttgcaacaaatctattttaaggcaagaagttgattatatgactcagactaggggtcagagatcctctctggcagaagacaatgagtccagctacagcagaggatttgacatgacgtacactgagtttgactatgacttatgcaatgaagtggttgacgtgacctgctcccctaagccagatgcattcaacccatgtgaagatatcatggggtacaacatcctcagagtcctgatatggtttatcagcatcctggccatcactgggaacatcatagtgctagtgatcctaactaccagccaatataaactcacagtccccaggttccttatgtgcaacctggcctttgctgatctctgcattggaatctacctgctgctcattgcatcagttgatatccataccaagagccaatatcacaactatgccattgactggcaaactggggcaggctgtgatgctgctggctttttcactgtctttgccagtgagctgtcagtctacactctgacagctatcaccttggaaagatggcataccatcacgcatgccatgcagctggactgcaaggtgcagctccgccatgctgccagtgtcatggtgatgggctggatttttgcttttgcagctgccctctttcccatctttggcatcagcagctacatgaaggtgagcatctgcctgcccatggatattgacagccctttgtcacagctgtatgtcatgtccctccttgtgctcaatgtcctggcctttgtggtcatctgtggctgctatatccacatctacctcacagtgcggaaccccaacatcgtgtcctcctctagtgacaccaggatcgccaagcgcatggccatgctcatcttcactgacttcctctgcatggcacccatttctttctttgccatttctgcctccctcaaggtgcccctcatcactgtgtccaaagcaaagattctgctggttctgtttcaccccatcaactcctgtgccaaccccttcctctatgccatctttaccaaaaactttcgcagagatttcttcattctgctgagcaagtgtggctgctatgaaatgcaagcccaaatttataggacagaaacttcatccactgtccacaacacccatccaaggaatggccactgctcttcagctcccagagtcaccaatggttccacttacatacttgtccctctaagtcatttagcccaaaactaaaacacaatgtgaaaatgtatctg

SEQ ID NO: 215 - DNA, 2444 bp, Homo sapiens
agtaacagttgattgttacattcagtaacactgaatgtcagtgcagtccaatttacaggctggagcagcagctgcatcctgcatttccccgaagtattacatgattttcactccttgcaaactttaccatctttgttgcagagaatcggaaatcaatatgcatagcaaagtcacaatcatatgcatcagatttctcttttggtttcttttgctctgcatgcttattgggaagtcacatactgaagatgacatcataattgcaacaaagaatggaaaagtcagagggatgaacttgacagtttttggtggcacggtaacagcctttcttggaattccctatgcacagccacctcttggtagacttcgattcaaaaagccacagtctctgaccaagtggtctgatatttggaatgccacaaaatatgcaaattcttgctgtcagaacatagatcaaagttttccaggcttccatggatcagagatgtggaacccaaacactgacctcagtgaagactgtttatatctaaatgtatggattccagcacctaaaccaaaaaatgccactgtattgatatggatttatggtggtggttttcaaactggaacatcatctttacatgtttatgatggcaagtttctggctcgggttgaaagagttattgtagtgtcaatgaactatagggtgggtgccctaggattcttagctttgccaggaaatcctgaggctccagggaacatgggtttatttgatcaacagttggctcttcagtgggttcaaaaaaatatagcagcctttggtggaaatcctaaaagtgtaactctctttggagaaagtgcaggagcagcttcagttagcctgcatttgctttctcctggaagccattcattgttcaccagagccattctgcaaagtggatcctttaatgctccttgggcggtaacatctctttatgaagctaggaacagaacgttgaacttagctaaattgactggttgctctagagagaatgagactgaaataatcaagtgtcttagaaataaagatccccaagaaattcttctgaatgaagcatttgttgtcccctatgggactcctttgtcagtaaactttggtccgaccgtggatggtgattttctcactgacatgccagacatattacttgaacttggacaatttaaaaaaacccagattttggtgggtgttaataaagatgaagggacagcttttttagtctatggtgctcctggcttcagcaaagataacaatagtatcataactagaaaagaatttcaggaaggtttaaaaatattttttccaggagtgagtgagtttggaaaggaatccatcctttttcattacacagactgggtagatgatcagagacctgaaaactaccgtgaggccttgggtgatgttgttggggattataatttcatatgccctgccttggagttcaccaagaagttctcagaatggggaaataatgcctttttctactattttgaacaccgatcctccaaacttccgtggccagaatggatgggagtgatgcatggctatgaaattgaatttgtctttggtttacctctggaaagaagagataattacacaaaagccgaggaaattttgagtagatccatagtgaaacggtgggcaaattttgcaaaatatgggaatccaaatgagactcagaacaatagcacaagctggcctgtcttcaaaagcactgaacaaaaatatctaaccttgaatacagagtcaacaagaataatgacgaaactacgtgctcaacaatgtcgattctggacatcattttttccaaaagtcttggaaatgacaggaaatattgatgaagcagaatgggagtggaaagcaggattccatcgctggaacaattacatgatggactggaaaaatcaatttaacgattacactagcaagaaagaaagttgtgtgggtctctaattaatagatttaccctttatagaacatattttcctttagatcaaggcaaaaatatcaggagcttttttacacacctactaaaaaagttattatgtagctgaaacaaaaatgccagaaggataatattgattcctcacatctttaacttagtattttacctagcatttcaaaacccaaatggctagaacatgtttaattaaatttcacaatataaagttctacagttaattatgtgcatattaaaacaatggcctggttcaatttctttctttccttaataaatttaagttttttccccccaaaattatcagtgctctgcttttagtcacgtgtattttcattaccactcgtaaaaaggtatcttttttaaatgaattaaatattgaaacactgtacaccatagtttacaatattatgtttcctaattaaaataagaattgaatgtcaatatgagatattaaaataagcacagaaaatc

SEQ ID NO: 216 - DNA, 650 bp, Homo sapiens
tccacattgtcctttgagaatgagaagtcatcctggagcacagctcttcccacgctccgggcccacacacccagcctcactccatcaaaggagccccgctgcctgcccacccaccctgggtgctttctggcttgcagtgctcttggcagacatgaggcaacgattgctcccgtccgtcaccagccttctccttgtggccctgctgtttccaggatcgtctcaagccagacatgtgaaccactcagccactgaggctctcggagaactcagggaaagagcccctgggcaaggcacaaacgggtttcagctgctacgccacgcagtgaaacgggacctcttaccaccgcgcaccccaccttaccaaggggatgttccaccgggaattagaaataccatctgccgtatgcagcaagggatctgcagactttttttctgccattctggtgagaaaaagcgtgacatttgctctgatccctggaataggtgttgcgtatcaaatacagatgaagaaggaaaagagaaaccagagatggatggcagatctgggatctaaaatataagctcccggaaggcagggatgttgaagtatcccaagggcttaaaggaatgtgtggcttatagtaggtgttcaataaatatttgttgaatga

SEQ ID NO: 217 - DNA, 1789 bp, Homo sapiens
cggaggaggtggagatgaatggcgggcgcggcgaccgggagccggacccctgggaggtcggagcttgtcgagggatgcggctggcgctgcccggagcatggcgaccgcgtggctgagctcttctgtcgccgctgccgccgctgcgtgtgcgcgctttgcccggtgctgggcgcgcaccgtggccaccctgtgggcctggcgctggaggcagcggtgcacgtgcagaaactcagccaagaatgtttaaagcagctggcaatcaagaagcagcagcacattgacaacataacccagatagaagatgccaccgagaagctcaaggctaatgcagagtcaagtaaaacctggctgaaggggaaattcactgaactcagattactacttgacgaagaggaagcgctggccaagaaattcattgataaaaacacgcagcttaccctccaggtgtacagggaacaagctgactcttgcagagagcaacttgacatcatgaatgatctctccaacagggtctggagtatcagccaggagcccgatcctgtccagaggcttcaggcatacacggccaccgagcaggagatgcagcagcagatgagcctcggggagctgtgccatcccgtgcccctctcctttgagcccgtcaagagcttctttaagggcctcgtggaagccgtggagagtacattacagacgccattggacattcgccttaaggaaagcataaactgccagctctcagacccttccagcaccaagccaggtaccttgttgaaaaccagcccctcaccagagcgatcgctattgctgaaatacgcgcgcacgcccacgctggatcctgacacgatgcacgcgcgcctgcgcctgtccgccgatcgcctgacggtgcgctgcggcctgctgggcagcctggggcccgtgcccgtgctgcggttcgacgcgctctggcaagtgctggctcgtgactgcttcgccaccggccgccactactgggaggttgacgtgcaggaggcgggcgccggctggtgggtgggcgcggcctacgcctcccttcggcgccgcggggcctcggccgccgcccgcctgggctgcaaccgccagtcctggtgcctcaagcgctacgaccttgagtactgggccttccacgacggccagcgcagccgcctgcggccccgcgacgacctcgaccggctcggcgtcttcctggactacgaggccggcgtcctcgccttctacgacgtgacgggcggcatgagccacctgcataccttccgcgccacgttccaggagccgctctacccggccctgcggctctgggagggggccatcagcatcccccggctgccctaggggccaggaccggcgtgacagcctccagaatgtcatggaagcagaatcgtacagtatgttcccttctgcatatgctgctttctcactcagcatcatttccttgagatgcatccaggctgctgcacgcatcaatagttcattcctggctgggcgcggtggctcacgcctgtaatcccagcgctttgggaggccgatgtgggtggatcacaaggtcaggagtttgagactagcctggccaagatggtgaaaccccatctctgcaaaaaatacaaaaattagccgggcaccatggcatgtgcctgtaatccctgctactcaggaggctgaggaaggagaatcacttgaacccgggcagcggaggttgcagtgagccgagatcacaccactgcactccagcctgggcaatagagtgagactccgtttcaaaaaaaaaaaaaaaaaa

SEQ ID NO: 218 - DNA, 1177 bp, Homo sapiens
ccgcgcggacggtgggcaggcgacggcggcgtgtggatggaggccttcgcccttggcccagcgcggcggggcaggcggcggacccgggccgccggctccctgctctctcgggccgccatcctcctctttatctccgccttcctggtgcgggtgccctcatcagttggacacttggttcgattaccaagagcttttcgcttgaccaaagattcagtgaaaatagtgggatcaacaagttttccagtgaaagcgtatgtcatgctccatcaaaagagtccacacgtgttatgtgtaacgcaacaactgcgaaatgctgaactgatagacccatcattccaatggtatgggcctaaaggaaaagttgtttcagtagaaaaccgcactgcacaaataacatccacaggaagccttgtattccaaaattttgaggagagtatgagtggaatttatacatgtttcctcgaatataaacctactgtggaagaaattgttaaacgtcttcaactaaaatatgctatatatgcttatcgtgagcctcattattattatcagttcacagctcgatatcatgcagtcccctgcaatagcatttataatatttcttttgagaagaaacttcttcagattttaagcaaactgcttcttgacctttcatgtgaaatttccttacttaagtctgaatgccatcgcgttaaaatgcaaagagctggtttgcaaaatgaattgttctttgcattttcagtttcatctctagacactgaaaaaggacccaagcgatgtacagaccataactgtgaaccttacaaaagactttttaaggctaaaaatctcatagagagattttttaatcaacaagtagaaattcttggcagacgtgcagaacaattacctcaaatatactatattgaaggtactctccaaatggtttggattaatcgctgctttccaggatatggaatgaatgtccagcaacatccaaaatgtcctgagtgctgtgtgatctgcagccctggatcatataacccccgtgatggaattcattgccttcaatgcaatagcagcctggtgtatggagcaaaaacgtgcttataagccattatcttcagttattcagtggtttattaaatgcaaagtatatatttgaaatattaacataataaattattatgccaaaatt

SEQ ID NO: 219 - DNA, 835 bp, Homo sapiens
cagacgacgtgctgagctgccagcttagtggaagctctgctctgggtggagagcagcctcgctttggtgacgcacagtgctgggaccctccaggagccccgggattgaaggatggtggcggccgtcctgctggggctgagctggctctgctctcccctgggagctctggtcctggacttcaacaacatcaggagctctgctgacctgcatggggcccggaagggctcacagtgcctgtctgacacggactgcaataccagaaagttctgcctccagccccgcgatgagaagccgttctgtgctacatgtcgtgggttgcggaggaggtgccagcgagatgccatgtgctgccctgggacactctgtgtgaacgatgtttgtactacgatggaagatgcaaccccaatattagaaaggcagcttgatgagcaagatggcacacatgcagaaggaacaactgggcacccagtccaggaaaaccaacccaaaaggaagccaagtattaagaaatcacaaggcaggaagggacaagagggagaaagttgtctgagaacttttgactgtggccctggactttgctgtgctcgtcatttttggacgaaaatttgtaagccagtccttttggagggacaggtctgctccagaagagggcataaagacactgctcaagctccagaaatcttccagcgttgcgactgtggccctggactactgtgtcgaagccaattgaccagcaatcggcagcatgctcgattaagagtatgccaaaaaatagaaaagctataaatatttcaaaataaagaagaatccacattgcaaaaaaaaaaaaaaaaaa

SEQ ID NO: 220 - DNA, 10058 bp, Homo sapiens
ctcgaggatcagtttgaatgacaggcatataggcatttattgtaactattctcactactataaaagacaagttttctgtaaaaaagtttaaaaagcatatgaacacaaataacaaaaaccaatgtaactaatattaacaaggtggtaatagaacactgatatcagactatacattctaacttaggaggccatcatgatcacctgaggagcttcatgaaaatatagtctttgaaccaccactattttaatgaacctcaaaggctgaaggaattgtgcatttccctcaggacagcaggagtggggaaaagaggctgagaaccactgtgtaaacactttaagggtatagaatatatattattcacccagtatttatcttaatgtctaacacttaagaagcacttaagaaacataaggtgaattaattaacgatccacagatgtacaaatgaataggcaagcttaatagtagctaactgccagatgtgaaaaaaatcattattcatatttgatatttaaaaaaattactcaggtatagagtttaaagagtatggctctctgtttgagtggaattgggtttccttcataaagccacagacttagttcactttcaaacacttacaagtaaacacccagagtaaaaatagttttaaatacacaatttgggtggggttgttgcttagaaatattcttgatttcttacatctgtttgacaagacagtgctcttatgtgactaacaaagcaaacagcagtcagattccttgtgctgaaataagtacactatttgcaaaaagggttgaatgtccaaggcttattcaataaggacaccacattttccaaaactaaaggggagtatagaatgacaaatacccacatatatttacatatccctaaaagaagacatacaacctcctggtatggatttttttgtgtctctaataagtactaactggagccaagtctaccatctgaccatggagaacagcagaatacctgaagcacaggaataatctaattttaaaactgggaggagcttagaaccacctagtccaaacttttcattgtgttgataaaaaacagacacccagagaggttaaagtgaaaggctctgaaaattgttgcaatagccacagatgaacaaatggtatacacaggggcatagcactatgtattaagagctgagaattagtcttctgaacgttcacgagtgataactaacaggtatcagctctattatagcaatagcagtatgtgtgtgcatgtgtatcaccatatatacacacaaaatattaaaatatatattttaataattcctttcaaaacaaattcaacctagcattcaaaagcatccataaagttacctcacctactttttcaaaattgtgtccaaatgggccataagccaaaaggcaggtgtttctctcacttatctttgtagtctcctacagatgtagcagagtacatattataattacaaaagctattccatatataatttccaaatgatgaattataaactttcctattttgttattctaaactgctataagaaacatattttatatgtatctatgagtattatacagagatatatacaacaatggtaaatttttttaatatggcaatcaacaaaatgcttacaagcaagagagagaggcaatgagatgccttatccatttacatttccataaagggctatacaaggctttgtttaaaatacagaaaattgcttgaaggggagagaaagggaaaagaaaaaggacaatctttagttcattcactggtcaactttcaattattcattattgttagtactgaatccatactactttaattctgtggaggtagaaaaatgatgtgtctatgcctgtgtatggaattgtcctcctcaaccagttcacctgcatagtcaatttgattttgattcaaaacgatgaaattaaataagatgaaaaatttggactctcaacttcccacctttattagattttttaggatcctaaaaactgattttaaaggcttcctaatattgttaaacagagtctaactaccaaaattgacaacaatagtgtttacttccacctttgagggaaagtgtttctaattgggatgattcctaactgcaagttaagccaataatattttttttaagctgaaagcaaagtttgaaaatttttttctcctgaaataaacacagcaatcttatgtaaattaacataatatgagattatcaaattaaggggtttttgcaaactctactgcaactctaaagtaaacccaaatttaagcaagaaaatctgaagtcatttactgaatatagcgtagtgttgtgaataagggatctaaatcctaaaagcctaaaagtaattaagaattggggtcagctattttcacaaaaatttatgaatattaatagacacattgataactttatgtaataactcaataatttagatgatggtctaaatccagtacccccttcaaggaattttatccgcttttatgtactaccacatattatataatatcaaccaattaacataagaatgtgcttttcaaaaataaaaagggggtatcatcattccaccgcgaaccagcctgaacactagagtattaattaataaaatagaatcacagacaaagacggtccttggttaaaactattaatatatatttaagacaatgggtttatttttaaataagaaaacaaggaaaaggagagcccagcccgatcttgtgtgcctacccaatagaactttccaccataattagtgcttaccaactttgaggggaggagcttaagctcagggtaacctcatgtagtaagggaaaaacagtataaataccactgaacagctcttgagaggcaccttctgcactgctcatctgggcagaggaagcttcagaaagctgccaaggcaccatctccaggaactcccagcacgcaggtaagcgtacgcttactggtggacttcccatgttaacttgcttggaaagaaactttaaagatttaaatacttgagttttctcaagtattagaagtattaagtgatttaaaatggttctactaatgcactccaaagtctttgcatcagtctgtggatgatagtccaataaaaccatattgtaaaatttgccctaatccgaatttcagtgtattttgaaactattagatatttcaggctagttcaaagatcctagattatttaatacagacatccaatctcaattttcgtttctttccttaggtaatcatttatttcactgatcctgagtatagcttccaaaaataactaagacatatattcacataactaaaaaatgatctctcatttatttatggcacatattaaaaatatataggataggttaaaaaagtagataactgtataaagaactcatctgtgaaacatgagaataaaaaaataggttaataacaatgctgtataaagttattcttttctgtttttcagaatccatctgagaatatgctgccacaaataccctttttgctgctagtatccttgaacttggttcatggagtgttttacgctgaacgataccaaatgcccacaggcataaaaggcccactacccaacaccaagacacagttcttcattccctacaccataaagagtaaaggtaaattgaattgtatattttgttctattaacaagttgcttgttgctttctataatcttaataatctctttaacaaaatgcatttaactttggtgttactttccaacttctgaattagcccaaattattacaacaaagtgatctgtgaaaaaagtagaacaagaatatccaataagtgtagtagaaaggatatacttgaaaatatagttgaaagatatacctgcaaaaaatcagaacttttgtgtgtacaaatttttttcctcagatgctgcttttgcacaaataactgcatgtaatcagaatcttgatctaatcaaaactaatcagtttaaattttagcctaaaaataactgccaattgtataaagaaggtagctggtttatttagctaaatattaaacatttacttttaaaactaattcaactagcccacaaacagatataaaccgagtcttatcaaaaaaatctgatggcctcccccccaacaatgaacaaatgtaattatgagaattgcacagacggacaatgaaactgcaattctcataattacttatacattttgaatatagtttagcggtaaaatccagagacttaactgtaatgcataagctgtgtgacctgaggtaagttacttgtcctcccatgccttagtttcctcatttgtaaaataaggagcagctatctcaagggctgctgcgaagtttaaatgaattaatacctgtaaagtgctttaagtgttgctattacttctactactacttctgttactctagttttatttctactacttttagctactaatatagccttcaataagttaactttcttcttgaatctgttgcttacctgtccagtttctggtactcttgaagattactgagataatatatgtaaagcactaaggttctcaaaggagggcaactctaggcctcatattcactaacttttatttaacagcaactgacacgaccgcctataaaatatctacagaataatataaactgactgtaggcttcaaactccctttccataatttttaattatatattttatactgtaaataaagctaaggatattgttataaagtttaaatattatgtcttttgggaacaaccattttgagcaatgaaacttatagaattgtctttttaagaagaaagatggaatttaaaatatttcacaaaaggaaacttaatatttgaaaataaatgcacaggtatacaacagatacttttgaatgtctcaaaatataaataaaaattttaaaatttaaaggcatgtaaagaaaaaaataaaagacaaagcaaccttccgctttacttgaagcaacaaacacaatttgaaaactttttaacaccttaataagagcataacaagtcttgaattaaaaagaaaatgcactattttagaaggttaaaaatactttgatcttctcttaatatacaccattatcttggctacttttgcagaacaaatgaaaatatcttaacaaatgaaaagttcagaagctgtatttaaactactaaatccaccttagtctctttttaagatagacactcaactacactatcatccattggcagacattaatgcaccataacaaacacaaaagcccacagtctatacaagtaagacattaagttgaaacaggaattcaaagagttattacataattcctaggcatatccatccaacacaggttaaaaaagagttctgtcaaaacatactaaattatgctgcagaggattccacagctggtgggcagatgcacgtgccacattctgacacaaccaatcacgatttcagtttgtggcatttaaaaaacttaatagaaggaagtagtcgttttaccttgaggattgtgccaccctaatcttgaatgaagaaaattttttcagatgacaacctacaaacaggggctgtcccccaagcattcaatagaagccaaattctttctcgcactgagaagttgagacccattaggacaacattccaagtgacaaagttcgccctgtcactggagttccagtctcggatgacgcccaatgcactcatttccattgacttgtttctcctttttaatagtaaaacagatttccaatcagactaagacaattatttttagtgtgaacatgacccttataatcagattctaaagcaaagctcaatctaacatagttggcattttaaaaaatcactattttattctccaacccattaaaaaattccttatttattcctctatttgcaatatatcaatatccacttatacataatataatcatgtatgtacactacatcaatgaaatatttaatatacggaaatcttttacataaatttttctcacagtctttttcctgatgtcattttctgaaaatccatggggaaagctctatgtatttatattaatcaatgttttcaaattgaaatataactctaattagtaaaaaaaaatctaaatctgaaacaattattttctatttcggcatatctattttaatgattcgctctgcatttatatacaccaaatgtttcaaatctcagaacatctgtaccctgtgcttcccatactgtgcccagccgcattttcacatcacaggcactatgatttttagtttaagtttagtttatcaggtcaagtgaactcacagctctatgaaatcaaacactatatatttgtatttaggtaagaactttaatactattttatgtacctcacctattatgtctaattctctagttctttgtttcaattttaagtcaataatggagagtataagagctcagagtatattctgaggtaaaagtaaatcaaccaaaatctaacctgtgttcagcagaggcatggcagatgtaaatcagaattaattctgtttctcttttatgtctgacagggtagctttgggagggaaaatttttatagttcttaaacattttctcacttattctgcactgtctttttctgccttttctgtacatgattttcccaaaataaatgtactaaatttacctccactgcacttattctagaggaattcttcaatcctagctcattttcatgaatcactgtcatgggataaaagtattatggtagccatggttttgtgaaaccatcttctccagcagaattttttaaaacagtataaaacatataatctaaaaccatttcagactgttctgtctacatggaataaatgatgctgaaatatcgtgtcccaattcatagtttgaaaggcaatgattctctttaatgtcactaaccatccccttctatgggtgggtgtgttgggtgtgtcttttaggtatagcagtaagaggagagcaaggtactcctggtccaccaggccctgctggacctcgagggcacccaggtccttctggaccaccaggaaaaccaggctacggaagtcctggactccaaggagagccagggttgccaggaccaccgggaccatcagctgtagggaaaccaggtgtgccaggactcccaggaaaaccaggagagagaggaccatatggaccaaaaggagatgttggaccagctggcctaccaggaccccggggcccaccaggaccacctggaatccctggaccggctggaatttctgtgccaggaaaacctggacaacagggacccacaggagccccaggacccaggggctttcctggagaaaagggtgcaccaggagtccctggtatgaatggacagaaaggggaaatgggatatggtgctcctggtcgtccaggtgagaggggtcttccaggccctcagggtcccacaggaccatctggccctcctggagtgggaaaaagaggtgaaaatggggttccaggacagccaggcatcaaaggtgatagaggttttccgggagaaatgggaccaattggcccaccaggtccccaaggccctcctggggaacgagggccagaaggcattggaaagccaggagctgctggagccccaggccagccagggattccaggaacaaaaggtctccctggggctccaggaatagctgggcccccagggcctcctggctttgggaaaccaggcttgccaggcctgaagggagaaagaggacctgctggccttcctgggggtccaggtgccaaaggggaacaagggccagcaggtcttcctgggaagccaggtctgactggaccccctgggaatatgggaccccaaggaccaaaaggcatcccgggtagccatggtctcccaggccctaaaggtgagacagggccagctgggcctgcaggataccctggggctaagggtgaaaggggttcccctgggtcagatggaaaaccagggtacccaggaaaaccaggtctcgatggtcctaagggtaacccagggttaccaggtccaaaaggtgatcctggagttggaggacctcctggtctcccaggccctgtgggcccagcaggagcaaagggaatgcccggacacaatggagaggctggcccaagaggtgcccctggaataccaggtactagaggccctattgggccaccaggcattccaggattccctgggtctaaaggggatccaggaagtcccggtcctcctggcccagctggcatagcaactaagggcctcaatggacccaccgggccaccagggcctccaggtccaagaggccactctggagagcctggtcttccagggccccctgggcctccaggcccaccaggtcaagcagtcatgcctgagggttttataaaggcaggccaaaggcccagtctttctgggacccctcttgttagtgccaaccagggggtaacaggaatgcctgtgtctgcttttactgttattctctccaaagcttacccagcaataggaactcccataccatttgataaaattttgtataacaggcaacagcattatgacccaaggactggaatctttacttgtcagataccaggaatatactatttttcataccacgtgcatgtgaaagggactcatgtttgggtaggcctgtataagaatggcacccctgtaatgtacacctatgatgaatacaccaaaggctacctggatcaggcttcagggagtgccatcatcgatctcacagaaaatgaccaggtgtggctccagcttcccaatgccgagtcaaatggcctatactcctctgagtatgtccactcctctttctcaggattcctagtggctccaatgtgagtacaccccacagagctaatctaaatcttgtgctagaaaaagcattctctaactctaccccaccctacaaaatgcatatggaggtaggctgaaaagaatgtaatttttattttctgaaatacagatttgagctatcagaccaacaaaccttccccctgaaaagtgagcagcaacgtaaaaacgtatgtgaagcctctcttgaatttctagttagcaatcttaaggctctttaaggttttctccaatattaaaaaatatcaccaaagaagtcctgctatgttaaaaacaaacaacaaaaaacaaacaacaaaaaaaaaaattaaaaaaaaaaacagaaatagagctctaagttatgtgaaatttgatttgagaaactcggcatttcctttttaaaaaagcctgtttctaactatgaatatgagaacttctaggaaacatccaggaggtatcatataactttgtagaacttaaatacttgaatattcaaatttaaaagacactgtatcccctaaaatatttctgatggtgcactactctgaggcctgtatggcccctttcatcaatatctattcaaatatacaggtgcatatatacttgttaaagctcttatataaaaaagccccaaaatattgaagttcatctgaaatgcaaggtgctttcatcaatgaaccttttcaaacttttctatgattgcagagaagctttttatatacccagcataacttggaaacaggtatctgacctattcttatttagttaacacaagtgtgattaatttgatttctttaattccttattgaatcttatgtgatatgattttctggatttacagaacattagcacatgtaccttgtgcctcccattcaagtgaagttataatttacactgagggtttcaaaattcgactagaagtggagatatattatttatttatgcactgtactgtatttttatattgctgtttaaaacttttaagctgtgcctcacttattaaagcacaaaatgttttacctactccttatttacgacacaataaaataacatcaatagatttttaggctgaattaatttgaaagcagcaatttgctgttctcaaccattctttcaaggcttttcattgttcaaagttaataaaaaagtaggacaataaagtgatgggtggcttttacagttgtcatggatatgtcctatattggtgatgcatctttattggtgatgcatctttatt

SEQ ID NO: 221 - DNA, 1700 bp, Homo sapiens
cgtcggcggagggaagccggcccaggctcggtgaggaggcaaggttctgaggggacaggctgacctggaggaccagaggcccccggaggagcactgaaggagaagatctgccagtgggtctccattgcccagctcctgcccacactcccgcctgttgccctgaccagagtcatcatgcctcttgagcagaggagtcagcactgcaagcctgaagaaggccttgaggcccgaggagaggccctgggcctggtgggtgcgcaggctcctgctactgaggagcaggaggctgcctcctcctcttctactctagttgaagtcaccctgggggaggtgcctgctgccgagtcaccagatcctccccagagtcctcagggagcctccagcctccccactaccatgaactaccctctctggagccaatcctatgaggactccagcaaccaagaagaggaggggccaagcaccttccctgacctggagtccgagttccaagcagcactcagtaggaaggtggccgagttggttcattttctgctcctcaagtatcgagccagggagccggtcacaaaggcagaaatgctggggagtgtcgtcggaaattggcagtatttctttcctgtgatcttcagcaaagcttccagttccttgcagctggtctttggcatcgagctgatggaagtggaccccatcggccacttgtacatctttgccacctgcctgggcctctcctacgatggcctgctgggtgacaatcagatcatgcccaaggcaggcctcctgataatcgtcctggccataatcgcaagagagggcgactgtgcccctgaggagaaaatctgggaggagctgagtgtgttagaggtgtttgaggggagggaagacagtatcttgggggatcccaagaagctgctcacccaacatttcgtgcaggaaaactacctggagtaccggcaggtccccggcagtgatcctgcatgttatgaattcctgtggggtccaagggccctcgttgaaaccagctatgtgaaagtcctgcaccatatggtaaagatcagtggaggacctcacatttcctacccacccctgcatgagtgggttttgagagagggggaagagtgagtctgagcacgagttgcagccagggccagtgggagggggtctgggccagtgcaccttccggggccgcatcccttagtttccactgcctcctgtgacgtgaggcccattcttcactctttgaagcgagcagtcagcattcttagtagtgggtttctgttctgttggatgactttgagattattctttgtttcctgttggagttgttcaaatgttccttttaacggatggttgaatgagcgtcagcatccaggtttatgaatgacagtagtcacacatagtgctgtttatatagtttaggagtaagagtcttgttttttactcaaattgggaaatccattccattttgtgaattgtgacataataatagcagtggtaaaagtatttgcttaaaattgtgagcgaattagcaataacatacatgagataactcaagaaatcaaaagatagttgattcttgccttgtacctcaatctattctgtaaaattaaacaaatatgcaaaccaggatttccttgacttctttgagaatgcaagcgaaattaaatctgaataaataattaaaaaaaaaaaaaaaaaaaaaa

SEQ ID NO: 222 - DNA, 2276 bp, Homo sapiens
aagcccagcagccccggggcggatggctccggccgcctggctccgcagcgcggccgcgcgcgccctcctgcccccgatgctgctgctgctgctccagccgccgccgctgctggcccgggctctgccgccggacgcccaccacctccatgccgagaggagggggccacagccctggcatgcagccctgcccagtagcccggcacctgcccctgccacgcaggaagccccccggcctgccagcagcctcaggcctccccgctgtggcgtgcccgacccatctgatgggctgagtgcccgcaaccgacagaagaggttcgtgctttctggcgggcgctgggagaagacggacctcacctacaggatccttcggttcccatggcagttggtgcaggagcaggtgcggcagacgatggcagaggccctaaaggtatggagcgatgtgacgccactcacctttactgaggtgcacgagggccgtgctgacatcatgatcgacttcgccaggtactggcatggggacgacctgccgtttgatgggcctgggggcatcctggcccatgccttcttccccaagactcaccgagaaggggatgtccacttcgactatgatgagacctggactatcggggatgaccagggcacagacctgctgcaggtggcagcccatgaatttggccacgtgctggggctgcagcacacaacagcagccaaggccctgatgtccgccttctacacctttcgctacccactgagtctcagcccagatgactgcaggggcgttcaacacctatatggccagccctggcccactgtcacctccaggaccccagccctgggcccccaggctgggatagacaccaatgagattgcaccgctggagccagacgccccgccagatgcctgtgaggcctcctttgacgcggtctccaccatccgaggcgagctctttttcttcaaagcgggctttgtgtggcgcctccgtgggggccagctgcagcccggctacccagcattggcctctcgccactggcagggactgcccagccctgtggacgctgccttcgaggatgcccagggccacatttggttcttccaaggtgctcagtactgggtgtacgacggtgaaaagccagtcctgggccccgcacccctcaccgagctgggcctggtgaggttcccggtccatgctgccttggtctggggtcccgagaagaacaagatctacttcttccgaggcagggactactggcgtttccaccccagcacccggcgtgtagacagtcccgtgccccgcagggccactgactggagaggggtgccctctgagatcgacgctgccttccaggatgctgatggctatgcctacttcctgcgcggccgcctctactggaagtttgaccctgtgaaggtgaaggctctggaaggcttcccccgtctcgtgggtcctgacttctttggctgtgccgagcctgccaacactttcctctgaccatggcttggatgccctcaggggtgctgacccctgccaggccacgaatatcaggctagagacccatggccatctttgtggctgtgggcaccaggcatgggactgagcccatgtctcctcagggggatggggtggggtacaaccaccatgacaactgccgggagggccacgcaggtcgtggtcacctgccagcgactgtctcagactgggcagggaggctttggcatgacttaagaggaagggcagtcttgggcccgctatgcaggtcctggcaaacctggctgccctgtctccatccctgtccctcagggtagcaccatggcaggactgggggaactggagtgtccttgctgtatccctgttgtgaggttccttccaggggctggcactgaagcaagggtgctggggccccatggccttcagccctggctgagcaactgggctgtagggcagggccacttcctgaggtcaggtcttggtaggtgcctgcatctgtctgccttctggctgacaatcctggaaatctgttctccagaatccaggccaaaaagttcacagtcaaatggggaggggtattcttcatgcaggagaccccaggccctggaggctgcaacatacctcaatcctgtcccaggccggatcctcctgaagcccttttcgcagcactgctatcctccaaagccattgtaaatgtgtgtacagtgtgtataaaccttcttcttctttttttttttttaaactgaggattgtcattaaacacagttgttttctaaaaaaaaaaaaaaaa

SEQ ID NO: 223 - DNA, 765 bp, Homo sapiens
atggcctcagttccgaaaaccaacaaaatagaaccgcggtcctattccattattcctagctgcagtatcaggcggctcgggcctgctttgaacactccaatttttcaaagtaaacgcaacgggccccgcggacactcagcttacagcatcgaggggcgccagaggcaaggggcgggacgggcggtggtccctcgcgcggaccgcccgcccgctcccaagatccaactacgagctttttacctgcagcaactttactatacgctattggagctggaattaccgcggctgctggcaccagacttgccctccaatggctcctcgttaaaggatttaaagtggactcattccaattacagggcctcgaaagagtcctgtattgttattttcgtcactacctccccgggtcgggagtgggtaatttgcgcgcctgctgccttccttggatgtggtagcctccaggctccctctccggaatctgaaccctcattccccgtcacccgtggtcaccatggtcggcacggcgactaccatcgaaagttgatagggcagacgttcgaatgggtcgtcgtccgccgccacggggggcgtgcgatcggcccgaggttatctagagtcaccaaagccgccggcgcccgccccccggccggggccggagaggggctgagggttggttttgatctgataaatgcaccgatcccccccgcgaagggggtcagcgcccgtcggcatgtattagctctagaattaccacagttatccaagtag

SEQ ID NO: 224 - DNA, 842 bp, Homo sapiens
gtggtatgtaccttagctgtgaggggggctgctgaaggcatggaggacagtaatgacggctgtgcctccttggatggtggagacctcagaaatggtctgctacacaggcactaggtcagtttcccgcccttagctgaatgcagatggatgctgggagatggatatggtgagatggtgtggggaggatgttagaaagctggaggtgtttatcacttctcaaggagctactgaatatagggggaaaaaaacaacaaaaagacaagcccagggagaaagcaccattaaggatatacctatgccagcttctatagctgcacctgctttattggcaggtcacttgccacaattgcatctgccctctaaactttttaattttcacactgtatcctagacatgaatgcataaaatacagtgtctggcgggataatgcagagaggtaccatcttgattttccccagttacattcacctggtctggtctctgtaagcttagaagagtagaatcactttattttttaaagacttccggccaggcacggtggttcacgcctgtaatgccagcactttgggaggccgaggcgggtggaccacctgaggtcaggagttcaagaccagcctggccgacatggcgaaaccctgtctctactaaaaaaaaatacaaaaagattagctgggtgtggtggtgtgtgcctataatcccagctactcaggaggctgaggcaggagaattcttttaacccaaaaggcggaggttgcagtgagccaagatcacaccactgcactccagcctgggcgacagaatgagactctgtctcaaaaaaaaaaaaaaaaaaaaaaaaaaaa

SEQ ID NO: 225 - DNA, 1353 bp, Homo sapiens
ctcgtcatgggccccgtccctcttcatttttcatcccggaatccccgtcccagaactggactccctgcctcccactccttacctatttccctgaactcttctagaaaaaaactcaccccagggagcttggtgacagagagggagctcgccgccagagagggagctcgccctgggaatggaggcgtagagacaggtttttgtttttttttctttaaatccggaaaagttgtgcctgagtacatgagacagcatagagacaagttttctctttattaactacagtgggtagcagaatcttggcaacccctaaatgatcaggaatctaatcggtaaaaaatgtaactttggccccttgatctataaatgtgtctgaaagcattacaacaggactcacaaagctactaagtttgactttcccagacaatgtatctgtgactcccgcttgttttttacatttaccttcattccacagccctgagttactgggtgagtccaagacatctcctcaatataaagtagcacactgcgttactatatgttgcaaccgggagccagtacagactttattcacctcacagttgcaagtgttcaatgcagtcacaatgcccctcagcagtgctcatgtgctgcctgtttttaggaagtattcacgtctaagtggtgtgtatatcttataggaatacttagtatttttaaaacctgattaattaaaaaaaattagtttctaggcagtcccaaatatagtattaaaggccaactgcaaagaaggaacactaagtattttttaaaccttattaacataaaaaaacattagtttttaggcagtcctacattaggtattaaaggccaactgcaaagaacactgagcgaggctctgtagatggatgtaataaaaatctataaaacaatgtgtttaaacctaagaattctactgctttccaattccttccctctgctccttttcctaacctcctgcttctccagcccttccctctgtccctttcacccctcaggccctcctctccccttagtccccaccaccctgtcacttctaaattgtggctctagcattgtcccattacctgctatgtgactgttctctccacagtggtcctgctcctgtgagtcagagtgtgtcatttcctcacctaaaacactccagtggctccacctcggtcttgtgaagcttctagaatgtcaggcacgtgagcatatgagggcatacctggttcatcttaggcactaaattaatttttgttgactgaatgaatgaaatatgaatgtattaaattgcatcacagaaagttataaaatgtaaaacactgaaaaattaagaaatattttatcttatgt

SEQ ID NO: 226 - DNA, 2376 bp, Homo sapiens; identical to SEQ ID NO: 193

SEQ ID NO: 227 - DNA, 1353 bp, Homo sapiens; identical to SEQ ID NO: 197

SEQ ID NO: 228 - DNA, 2955 bp, Homo sapiens
ggaatttctggactcactggcctctaaggggccagaagcccttcaggagttccagcagacagccaccactaccatggtgtaccaacagggtgggaactgcatatacacagacagcactgaagtggctgggtctttgcttgaacttgcctgtccagtcaccaccagtgttcagccacaaacccagcaagaacagcagatccaggttcagcagccgcagcaggttcaggtccaggtgcaggtacagcagtctccgcaacaggtctcggctcagctctccccacaactcaccgttcaccagcctactgagcaacccatccaggtccaggtgcagatccaaggccaggcaccacagtcagcagccccctccattcagaccccgtctctgcagagtcccagtccctcgcagctgcaagcagctcagatccaggtgcagcacgtgcaagcagcccagcagatccaggctgcagaaatcccggaggagcacatcccacatcagcaaatccaggctcagctggtggctggccagtctcttgctggtggtcagcagatccaaatccagaccgtgggtgccctttccccaccaccatcccagcagggctcaccccgggaaggggagcggcgggttggcacggccagtgtcctccaaccagtgaagaagcgcaaagtggacatgcccatcactgtgtcctacgccatctcagggcagccggtggccaccgtgctggccattccacagggccagcagcagagttatgtgtctttgaggccagacttactgacagtagacagtgcccacctgtacagtgccactgggaccattactagccctacaggagaaacctggaccatccctgtttattctgcccagccccggggggaccctcagcagcagagcattacccacattgccattccccaggaagcctacaacgcagttcacgtcagtggctcacccacagccctggcagctgttaagctggaggatgacaaggagaagatggtgggcaccacatctgtagtgaaaaactcccatgaagaggtagtgcagacccttgcaaactctctctttccagcacagttcatgaatggcaacatccacattccagtggctgtgcaggctgtggcaggcacgtaccagaatacggctcaaactgtccatatatgggacccccaacagcagccgcagcagcaaactccccaggaacagacaccaccaccacagcagcagcagcagcaactccaagttacttgttcagctcaaactgtccaggttgctgaagttgaaccacagtcacagccacagccttccccagaacttctgcttccaaattctttgaagccagaagaagggcttgaagtatggaaaaactgggcccagaccaagaatgctgaactagagaaggatgctcagaacagattggcacccattgggaggcgccaactgctgcgattccaggaagatctcatctcctctgctgtggcagagttgaattatgggctctgtctaatgacacgggaagctcgaaatggagaaggtgaaccctatgacccagatgtgctctactatattttcctgtgtattcaaaagtatctttttgaaaatggaagggtagatgacattttctccgatctttattatgttcggttcacggagtggctacatgaagttctgaaggatgttcagccccgggtcactccacttggctatgtcttgcccagccacgtgactgaggagatgctatgggagtgcaagcagcttggggctcactccccctccaccttgctgaccaccctcatgttctttaataccaagtacttcctattgaagacagtggaccagcacatgaagctggccttctccaaggtcttgcgacagacaaagaagaacccctctaatcccaaggataaaagcacgagtatccggtacttgaaggcccttggaatacaccagactggccagaaagttacagatgacatgtatgcagaacagacggaaaatccagagaatccattgagatgtcccatcaagctctatgatttctacctcttcaaatgcccccagagtgtgaaaggccggaatgacaccttttacctgacacctgagccagtggtggcccccaacagcccaatctggtactcagtccagcctatcagcagagagcagatgggacaaatgctgacgcggatcctggtgataagagaaattcaggaggccatcgcagtggccaatgcaagcactatgcactgagatgccttggccatggcacaagagaaaccagccaggaaaaaccagacagactttcacactaaagaagaggcctccatttttttttttcttttttttattggtgtagttacgaagcctttcaggctgcttctgtttaaaatataaaagaaaactttgccccctttgcatcttcataaacctgctgcggcagactcctcagccgatggtggctctgggtttccttgagtgtcatatgtcctagaaagttgctggctgactcttttttgtctggggcctggggaaagggcttggactgtgaaaagaaatgtggcccctttccatcttcaagagagatggaattaatgatggatggaccctggagggaatctccccagccgacttccactgggctgacagactttgctgaccacaggggaacgatgttcttttctttcttcatgatcagacataaacttagcatcttaatggaagaaaaatgaggggaacttcaattatgatttattaaagacaatttctattacaccctcctttatgacaagtgacattttagatgtaaaagtaaaaactttaccatgccttttttttttttgttggcctaacattgaggccttaaaacctgaggctcctgtgcctgatggaattcttgtaacatacacttgtgtatcatataaagataccactctgtttctcttaaaaaaaaaaaaaaa

SEQ ID NO: 229 - DNA, 458 bp, Homo sapiens
  misc_feature (399)..(399): n is a, c, g, or t
  misc_feature (442)..(442): n is a, c, g, or t
ttttcttagagagcatatttctttattctatttttatcatgcaggaactgaatcagcaggcaggatactgctcttctccccaacctcccccatctaaaggagatgagattttgggacataggtacaaacatagtggaccataggtacaaacatagtggacagggaactcagtggtcttgtgggctacagcattaaccacagcatttgttagttactgccaagaagcctgtatctgtagggtaaaatcctcgctgaagtgggttgccaaaacaatcaatatcacgttgcctaagagcaggaagttctcagggtccacgtgcagcttgttacagtgcaggtcactcagtgtagcaaaggtgcctttgaggtcatccgtgagcataacagcttttccgaagnggattcagcaccttcttgccatgtgccttgactttggggttgnccattattggcacagt

SEQ ID NO: 230 - DNA, 2158 bp, Homo sapiens
ggaggcaaacaacccatctctcttggagaatccacacttcgtttcttctaggtccagcctaaatgttacctcctccagggagcctttccagatactgcttctcctctctcccccaactccctcccacaaatgaagttttctcttctgaattccttgctggtactgtcacttatattcttttgggtagatctctgggcatgcatatgtcacctcctgtgactgtgggtttcttgacaacctaatcaatgcattgaacaaaggagatgtttagacaacccatataaaatgaataagagaaatagggtgaataccgtctaccccaattgcaatcagattagtttcctttattttgaaaacgattagaactagtagaggagttagatgtggcccactagggaacaaattttcatctccaagccgtcctctggctcgatcgggtctgcactgggtctgcatcaacttgcgctggctcagagggaggctcagccccagcctggccttcctggtgcccactcccaacatcctgagcagggccgactctaggcaccccacgattagctgagtgatctagggcaaggacctaggcgtctctaagtcttagtttccccatctgaacaatgtggataatgacacgtacctggggtgggcaggctagagtaaatgggaaaatcaaagcgccagccagagcgggtcgcactgttagttcctgtattttctcctcctgcctctggtttcttccgttccgttctagctgcctgaagacccagcccgacagcgatgcctgtcagcccgcgtcgcccaccagggcagctgctctcccaactcgcatggggggcaccaccccgcctcggtgccctagagctgagcgcagccgcggctccacggggatcgccagggcctcagccctcgcggccggcggcgcgggagtgttgcggggcagggaccagagcgcgatcagagcggccacccccgatttaggtcgccagctttccagtcactgcgatggccactggggcgccccttccatcctggttaaattctcattgtgatccccagccctcttctcggttccccacacccaggaggccggttctccgccgctcaggctgggagaggtcaccgctccgggcagggtggacccccagctccgtctcggaggacctttcgccggaggcgagcaggaaggggttaaccatgagcctcccaccctcacctcccagaccctggtgccgggctaaggcctccgcttccctcctgaggtctcattaggaaaccctcaccgctattttcaacatttcctcaatcaagtgcctttaaatagagctgcacaaacagattggcggcaaaagcgtagatcttgtcacgattgagaccaatccagtatttcagccttgtttgctttgcaattacgggttggcttgtggctacggtgccaccggggcaaatctgcagccgctcgctttctcctctgcgctccgggcgggtggaggaagcgacccgcggagtcactgcagggaggagagggggacgcgcgcggggggaggcggcggagggcggaggagactcgcttgcaccccagggccgcgggcacgcagagctgtgttgaaggacatacttttcaggttcctgacagtcactgagctatacgcaataataaagtgcgtgattcgcgtgtggaaaccagtgtcgtgtccttaccggcttccttttctgtccaccttccctctctcttctacctccgtctcgcttttcttcagtgcatgttagcggtttgctggatttcccttctccctcgctgttcaactgctagcatgatttgttacattttccacagctgtttattcttgtttgactttttgtacaaagtcactttaaatctgctgcagaaagaataaagcacctagccctttggatggactcctgcaggcgtgtggctgtccctggcccacttttaattctttggagatggctcttctgtgtaaatcagctgctgggtgcgttcggtcacctcgtaggccagcctagtttgtatcagcagaacagtagtggactcgactcaggtcgtaagccttatatttcacagacaattaaatcttggctgctgttgaacaaaactgtaatatttactttgttctataccgagaagcacttttaaagt

SEQ ID NO: 231 - DNA, 5174 bp, Homo sapiens
cacaactcgcggctctagggaaggccacagacctcagctgtacgagcggaacctggactagaggaactttcctcaggactcagggcacacagcccctcggccactactgtctgcgagcccgaggcgcaggggagcgccagcggctgcaggtacgctgcgcacccgcactggggcctgggcggtgcagcggcggcgggagggtcctgggaaccgcagccgccgaggccagtgtgtgagccggccggccgcggcaagccgcatcccccggccgcccctcgcagccccttgctccccggcagccgccgccgccctcacgcagcccagccgggcgctcgcgccaggacttccccgccgcccgcctcggcccggaacatggctgcgcgccctgctgccaccctcgcctggtcgctactgctcctctcctcagccctgctccgcgaaggctgccgagcgcgcttcgtcgccgagcgggactcggaggacgacggagaggagccggtggttttcccggagtcgcccctgcagagccccacggtgctcgtggcggtcctcgcccgcaacgcggcgcacacgctgccgcacttcctcggctgcctggagcggctggactaccccaagagcaggatggccatctgggcagccactgatcacaatgtggataatacaacagaaatattcagggagtggttgaaaaatgtacagagactctatcactatgtggagtggaggcctatggatgaaccagagtcttaccctgatgaaattggaccaaagcactggccaacctcccggtttgcccatgtgatgaaactacgacaggcagcccttcgaactgcgagggaaaaatggtcagactacattctgttcatagatgttgacaatttcctgactaatccacagaccctcaatctactgattgcagaaaacaaaactattgtggcccccatgctggagtctcggggcctgtattctaatttctggtgcggaatcacccctaagggcttctataagaggaccccagactacgttcagattcgagaatggaagaggacaggctgcttccccgtccccatggtccactccaccttcctaattgacctcaggaaggaggcctcggacaagctgactttctaccccccacaccaggactacacctggacctttgatgacatcattgtctttgccttctccagcaggcaagcaggcatccagatgtacctctgcaacagagagcactatggctacctgcccatccccctgaagccccatcagacactgcaggaagacatcgagaacctcatccatgtgcagattgaagcaatgattgaccgtcctccaatggaaccctcccagtatgtctcagttgtccctaaatatccagacaagatgggatttgatgagattttcatgataaacctcaaacgcagaaaggacaggcgggaccggatgctgcgcacactgtatgaacaggagattgaggtcaagattgtcgaggctgtggatggaaaggcactcaacacaagccagctgaaggcactgaatattgaaatgctgcctggctatcgagatccctattcctccaggcctctaacaaggggtgaaatcggctgctttctcagccactactcagtctggaaagaggtaattgatcgagagctagagaagactcttgtaattgaagacgatgtgcgttttgagcatcagtttaagaagaagctgatgaagctgatggataacattgaccaggctcagctggactgggaactgatttatattggtaggaagaggatgcaagtaaaggagccagagaaagcagtgcccaatgtggcaaacctggtcgaagccgactattcctactggaccctgggctacgtcatctctctggaaggagcacagaagctggttggagccaatccttttgggaagatgctgccagtggatgagtttctgccagtcatgtacaacaagcatcccgtagccgagtacaaggagtattatgaatccagggacctgaaagccttctctgcagaacccttgctcatctaccctacgcactacacaggccagccggggtacctgagtgacacggagacctccaccatctgggacaatgagacagtggccaccgactgggataggacacatgcctggaagtcccggaagcaaagccgcatctacagcaatgccaagaacacagaggccctgccaccgccaacctccctggacactgtgccttcaagggatgagctatgaaggctccctgggagtgtggcccacatcagttcaacatcctctggtttttctaaagggctattcatctgtttgctccagttttctgttttgttttgttcttagtggtcacagtcatctaaccaaagtgatctagtgtgatagatcgaaattaacatatttttgaccatggaaggaaataaggaaattcaacccaaatttcccaagacggctgaaagacaggttttttggaaactgttaagataaactgtaatccagacacctaattcttcagttcactactcatgtgatactgattcccacattaaggttgaacaacatggctcagagtcttgttcaagagaaagtgatcaccgagctgtcacatcagcaaatatgtagtcaaggcagccaggccaactagaccacacttattggtctagtttgtccgttttatatgacattgaaaacttgtgtgtgcaacttttgggggacaggaatcacttaaaatcatatttatttggctttttatttaaaggattctgtcacaagtcttattgaaaagtagattttttaaaaaaaaaaatcttagtccctgttatccagtaggggtgggtatttgggtccgactgagacttggcctgtgaccatcatggcagttggagttctcatatagaggtgaccagtttgccatgtggatataatttagtagatatttgacagtttgtgtaggtatttgagggaaaaaactcaatgtttggcttttttattatggccactcgagtcaggatgctctatttataaagataaatgtaatatataaagggtgaggactggctgtgcatcctgccctgtcccgggtttgcgcgctgctacagagcttcacgctctccgctccaccccttagcctgggaacccaccgcagtgwagttctgtgagtcactgctaagagacagagcacattttcaggccagcaactatccttgccagggttttttcattatattttgaattatttattttacaaaatgggcgaagatattgtcttttaggataaggcagagaaacagatgttgcagacttccacagcacccggggagtggtgggtgtggacacattggttcggcaatctgattctcctgaatttcccagccaggctcttgtggggaggcctgtggatggggggatttgaactatttggaaacaaatgattctctatctcaggtgagaaacctggtcagaaacaaagggctggtcacctgatttaggccagcaaccagggaagctcttagaatcccaggcggacaccctttctcaaaagatatcccctaagagtcctttctgctttcttcacagattgattttatgtaaaatgcagagttggactacacgatttcttcccactccacaatctgtcatcctagtatagatcatggtggtttccctcaagtttatgttctcatgccctcaatctgtaaatttttgtctccagaaaaaccctcccaggcatcccataccagcaccgttcctcatcactgtccatgcaccatgcagccatatggggggccgtgcacaccccaaaccctgagcttcacacttaaactcatggggaggggcccttcagagcagagtccacaggcgggtggtgctacatacacaagcttagtgtacgagtgtaagatacactttaagccagacacctaattcttcagttcactgcccatgtgatactgattgccacattaaggttgaacagcatggctcagagtctagagaaagtgatcaccaagctgtctcatcaccaaataggtagtcaaggcagcctcatctccccaggtgaggggcgggtccccactttaggacaagaggcagcttgccttccaccagacgccagcctcggccttccttcccgactcactgtgggtacccttctacactgaccagcaagctaggccgctggaggaaagggaactcacccaactctaaattgtgccgcttagacttagctgtcagtgtgacttcctttcccacccacccccagaaaaacagaaagagcatctggggagcgagtgaaaattccttaggtgattcctaagatttccttgggtatctggtttttgttttcatatttgagtgtgtgcatgtgtgcatgactttaatgacttttttaatggggtggtagttgtctgggttgctgggtttgaaggaagtttgggttgatttttgtggtgttttgtttaatagagaatttttttttccctgtycccctgtcagctggtctgacagatttaagaactctcattcttaaaagactttggacttaaatcctagcattttagactaggactgttctactgtgaagaaagttctgtctcctttagcccggtttgtttctccctgctcaggtctagaatcccaagcagtgtcctttcctggtgaacactgtgagccgcagatgtgacttttttttaaagtcatctcttcagcaatccagaggttccttgacctcattatttgtcctatctctcccttatagtcctaagccaagacatttgacctttgacatttgacctttgcagtgtcatgtgagggcgtcagtatagaggcctttgcatctgggcctggcacccgctctctgcctctggaggctaaaccctgtctggatttctcttgggatctaacgtgggatcttctggacagacaaccgtgacatcagcagtgctggtgctgctgtgtgtggactgaacacctgcactttgcagaggacacgctgcatgggccccgcttgcggttcattcaggcctgctgcaggagctctgagaacaagaaagagtggacacccgttcccctgcatcatctgtcttgcgtgctatttcagagtggggaagtgataaactatttgccttctggagctctttgtgaaaaattaaaaaaaaacttagctc

SEQ ID NO: 232 - DNA, 125856 bp, Homo sapiens
gatcataggggaggggtacgggccgccaggctgtcatgggccgcggaatgacagcaattgcctctactgtgactgcagcgctctggattcagggagagggacagactggggggtcacctggagaccatctctgagctttctgattacccagaaatggcgtagggtccaagaagagggtaagaggaaccgaggggctgcgtgttaggggcagggacaggccctggcctaggagctgtggggcaggggacagccaggtgtgtggggagggttagccctgtgacaacaagataagggaccaagaacagcacaagcccagagtggtgaggacaggggctgcaccagagatgagaatccctgcctcgtggacaaggcagccgccgtcgtggagtcaagggacacagaatgagaggggcttgttctcacagggtaggggggtggcaggttgctggggaaagtgcaagacatgacacccccgcacccccatagagcagggcatggggactcaggccctgaaactgggggccttggggacacattggcacatgacccgtcaccccctcccaggtagaaacatgagtgtggagagctactatggggagaaagaactccatgccaagtaaggttcaaaggcggggggagccccaggaaacctgacaacagtttgtcccaattcctacccccaccaggaccttagtatgtggcaaccagggcaggtacatctcaggcctggggtgggagagccgggggtggggggtgtctgggcctgggggaaggtgcaggaggagccatacctaaatggacccagcctgagaaagccacttttggtccctaatcccaaggtggcaggtctaaagaggacatggcctctctccctgggccaccagaatgccccgctggtctggggttcaggcccggtaccccctgcctctcaagctgtgcgcagtccccagctctcgcagttcccacaggctcttggcctcctctccagggtgcatagaggtgctgcgaggaaattccaggggacacagcagccccatctccagcaagggcagtgagggggccagcaacccaggaggggcctcctatactcaggccatggcgtcggtcttttcaggaatgacccctcagggactgcaaggaccctttgagaggcaacactgggcagttgttattgcaggaacactggctcccaatagcttggctcagggtctggcctctgttgctcgacacttcatggcttgggcagctcactggacttctctgtgccttactttctgccagtgtgaagtaaggaaaatcatggtacccacctcctagggtcaatgtgaggacagaaataaataatttattatacaaaagctttagagccaggcatggcagcttatgcctgtaatcccagctacttgggagacccagacaggaggttgagaccagtctcggcaacatagcaagaccccatctctattttttttttttttttttgagacagagtctcactctgtcaacccaggctggagtgcagtggcacaatctcggctcagtacaacctccacctcccgggttcaagcgatcctcctgccttagcctcccaagtagctgggattacaggcacgcgtcaccacgccaggttaatttttgtatttttagtagaaatggggtttcaccatattggccagtctggtcttgaactcctggcttcaagtgatccacccgcctcggcctcccaaagtgctgggattacaggcatgagccaccgtgctcggccccatctctaattttaaataaataaataaatactttttttttgagacagagtcccgttctgtcacccagactggagtgcagtggcgtgatctcagctcactgcagcttccaactccggggttcaagtgattctcttgcctcggcctcccaagtagctgggattacaggcgcctaccaccacgcctggctaatttttttgtatttttactaaagatggggttttgccatgttggccaggctggtcttgaacctgaccttgtgatcctcctgccttggcctcccaaagtgctgggattacaagtgtgagccgccgcgcccggcctataaatacattttaaattgaaaaaaaaaaacaacagctttaaggctgggcacggtggctcacacctgtaatcccagcactttgagaggcaaaggcagaaggatcacttgagcccaggagttcgagaccagcctggacaacatagaccttatcactacagataatttaaaaattgggcaggtgtggtggtgcatgcctgtggtcccagctactcgggaggctgaggtggaagaattgcttgagcccaggctgcagtgagccatacctgagccactgcactccagcttgggtgagagtgagacactgtttcaaaagaaaaagtagctttagaaaagtgcctgcatgtggccaggtgcggtggctcatgcctgtaatcccagcactttgggaggccgaggcaggcggatcatgaggtcaggagatctagaccatcctggctaacatggtgaaaccccgtctctactaaaaatccaaaaaaaaaaaaaaattagccgggtgtgatggcgggcgcctgtagtcccagctactcaggaggctgaggcaggagaatggcatggacctgggaggcagagcttgcagtgagccaagatcgcgccactgcactccagcctgggcgacagagcgagactccgtctcaaaaaaaagaaaaagggggctgcagcattgtaaagttaatgaacagtagtattgcattagtaatgccattattctttgttttgttttgtttgagatggagttttgctcttgttgcccaggctggagtgcagtgacgcgatcttggctcactgcaacctctgcctcccaggttcaagcgattcttctgcctcagcctcctgagaagctgggattacaggcgcccatctccacgtccagctaatttttgtatttttagtagagacagggtttcaccatgttggccaggctggtctcaaactcctggcctcaggtgatccaccccactcagcctcccaaagtgctgggattacaggcatgaaccaccatgcctggccaatgccattattcttgttaagagctaggagatttttccagagagagcagcttcctggattagtctaggaggaacattttcattctactcctggcctggaaacaagcttggtctgaggccgttgccccgctgagactctgtgggttgtgaggctagctgaggagagaggctggaggcctggctaaggcgccttggcccagcaccttaccccttcttcactgcagggggttgagtcaacaactgaaaacggatgaggccagactgactgaagggcccaagccatgggacagccaggacctctgtgctgaccagatctgtctaccaggatcttcattctaagaccggcctcccacaccgaggcccctttctcccaggacctaccttctcggaaccttggctgactgggaaaagtctctatcctgtgctgactggctgcatttccaacacatcaccccatatgtcacatggaccccccagacactgcacacccttctacacgtcccttacaggtttcctttcccaatctactttttacatcttctcggtccttttatctcctacatctcagctcatgatcctgattcattcatccttccaaaagaaaggagtcagctccttcaccagttccttccccctcccctgatgtatacccttcatccaccattttctaaatacaatgacgttatgatagatcagtattacaagttagattgcaattctgccctctgagctaagccacgtagtatattatgatgatctttctatctgtgaacaactttttgtattccttggagttagtggtcatcttggtttttcatttgtggtccatctgccctttgtttttgtttttgtttttgtttttgtttttagagatggggtctcactccacctgccatttatccagaagtcaacatttattcttcaactccctccacctgggcttctgctcaaaccagcccattgaaactcctgttgtcaaggtgttaaactacttccatattgaaaaatgtggtcggctgggcgcaatggcttacacctgtaatcccagcactttgggaggccgaggccggtggatcacgaggtcaggtgttcgagaccagcctggccagcatagtaaaacctcgtctctactaaaaatagaaaaattagccgggcgtggtggcacctgcctgtaatcccagctactcgggaggctgaggcaggaaaatcgcctgaacccaggaggcggaggttgcagtgagccaagatcgtgccactgcactccagcctgggcaacagagcaagactccgtctcaaaaaaaaaaaaaaaaaaaaaaaaacgaaaaatgtggtggtgatgtctatgtccttatttcacatgatctagcagcatttgacatgggtgaacacttatccttttctttttttttttttttctgagacggagtcttgctctgtcgcccaggctggagtgcagtggtgtgatctccgctcactgcaagctccgcctcctgggttcatgccattctcctgcctcagcctcccgagtagctgggactacaggtgcccgccaccgcgcccggctaattttttgtatttttagtagagacggggtttcaccgtgttagccaggatggtctcgatctcctgacctcatgatctgcctgcctcggactcccaaagggctgggattataggcgtgagccaccgcgcccggccacacttatccttttctgaaacacactttgtttggttccaccgatgctacactctcttggttttccttctgttacaccgggtgttctctctgtctccgtttctggctccttctctttgaccttgacttctaaacgttggagcatcccaggaatcagtcctgtgtcccttctcttcctgggtgatcccacaattttatatacttactacaagctaataattcccaaactggtatttccatcctgggcctctccccaaagagccagacttatagtttcaactgcccagtgacacctcacattggatatccaataggcttctccaacttaacaaagtcaacacgcaactccagattctcagctgtttccctgctcttccagggttcccacctgtgtgatcttaccaccatccaaccagctgctcctcccagaacctgagactcaccctgggtcttctctttccctcactgttgcttatgttacctctaaaatcagtctcaactccaactgctgctttgggatctgagatcctgctgtttccgtgtcctggaagattcctctacccgcaccctccccaggattcatttgattggtttaaatggcatctcttaagaggaggctcccctgactgccctatctagagcatcccccatctctgttatcttctgtctgggactatgttgatgaatttcatagcacctactgcaattcacaattcattttttgtgtgtctatctttttgtgtgtgtatgcctataacccctttaaaatgaaacaccagggcagaaaggaaggactctacctttcatgctcagtacggtaaccccactccaggtagagggtgttcaataaattatggaaagaaggaagggaagctctgggtaccagcttcagctctccagggagttctgtgtgacccagggcaagtcacacctgttcccaaggttatttacttgaagtactaaccccacttcctgtcccactgaggtcttaagggaatcagatgagggtgccataaagggttaagatttctgcaatccttacataataaaacgtggcaagcctccagatgaaaccccaaatgtcagaatgttctataaagtacttccttacccttagaccaccttttctgagaagaagtaacagttaactaatcttagcagagcatctgccctgcccacaccttctgtttcttattcccctgctgtatataccatagaacatctccactactgccagagagggcatggcctcattttctttctatcttttttcctttttaattttttttttttttttttttttttttgtagagatgagggtctcactgtgttgcccaagctagtctcaaacccctggtcccaagtaatcctcccaccttggcttcccaaagtgctgcaattacaggcgtgagccactgtgcctggccattggcttcatgttctttttcttttcttttctttttttctttttctttttttttttttttttttttgagacagtgtctcgctctgtcgcccaggctggagtgcagtggtgcgatcatggctcactgcaaactctacctcctgggcttaagagtgatcctcccacctcagcctcccgagtggctggaaccacagcaccatgcccagctaatctttgtttttgtgcagacaggatttcaccattttccccaggctggtctcaaactcccgagcccaaatgatgtgcccaccttgacctcccaaagtgccgggattacaggcatgagccaccgtgcctagctggcttcattttcaaaagaacactgctggtagcagtaagtccagctttctctcttttcacctgttggctcactgcaacctccgcctcccgggttcaagcaattctcgtgcctcagcctccctagtagctgggattacagatgctcaccaccatgcctggctaatttttgtattttttgtagaaatgggctttcaccatgttggccaggctggtctcgaactcctgacctcaagtgatccgcctacctctgcctcccaaagtgctgggattaccggtgtgagccacggcgccagcctccagtagtatttttgaggacccacacaaatgctctgtaaactatgaagaggggaacaagagcaaacaaaagatgttgtgggagcccaagacctgcttactgaattgaatcaaagaggatacattgagcagggatgagaaacctctgagaaaaatgctgagcctgaggggacaggtatggaactgaaatggatccactgcaggaccaagtaaaaaagggcgggggaggccttctgctctttccagaccaaggcacatctcagctggattgaagagctaaatagaataaaatcagccgacaagctgggcgcggtggctcatgcctgtaatcccaacactttgggaggccgaggcgggcagatcacgaggtcaggagttcaagaccatcctggccaacatggtgaaaccccgtctctaccaaaaatacaaaaaaaaatgagctgggcatggtggtgcgcgcctgcagtcttagctgcttgggaggctgaggcaggagaatcacttgaacccaggaggcggaggttgcagtaagccaagatcgcgccactgcactccagcctgggcgacagagtgagactccgtctcaaaaaaaaatcagctgacgagggccggggagcggcggggaggggatgcgggaagccaggtctgaatatttatcgtatctctagaggggggttacattaaacttttaaaagaaatcagaaatgaaaagacaataaaaattctttaacttgcaaaaataacctaagtaaaaggcaaaataaacgaagaaaaatatttttgacaaactcgtttctatatggaaaacctgtacggcagcaagacctgtagactcgcatctagagacgctcaaccctagctccgtgttccaagtgacgtggcctgtcgcacccgccggggacaatgactgcggccctggggtcccacagacgttccctttgctagacttaaggaagagctaggcctgtccgcgctcccagcccccacgcagccagacacccgcgggtgctgagatgaagagtgaagtcaccaggagagacaggaaacagcgcgggcctcggggacccgagggcgcggaagctcgggggccggggtcgagcacagattgggaggcgcagcgctgggcgcacgtccccgtcggcccggcggcccctaatgaggcgcgctgtgcgcagactgctaagagcagcatgagcacggctccggcggcccccagggccccgcgggtcggcgccaccccggagcgcggtgcccggaatcacttagcgccatcagccgggcggctgggagggggaagcggccgatccgggcggctgggagggggaagcggccgatccaggcggcagcggagggggctgcagcggaggcggccccggcttgcacgctcgcccttccgcctgcccggcagggccccgtctgagccccaggccccaggcccagcggcgccgctcgccggtgaaggaaaccagcgcagagaggccgcgctgccaggcgcgtggtggtccgggggtccacgtgtgagcctcgccctaggctgccaattgagagttccacctccgcccagagagaccccacctcacccctccaacctggggcgcgcgggccggcggaggggtcctggggcgagtgggcaggataggccgccgcgcggggtgggcttctacggggtgtactcgttgcctgtggctggggactgaaattccccggaaaaggagacggggaggacacacctggagggataaacagcttgtgcagggatgtgaaagagagaacccagctgtgtgtgcgtgtgcgcgcgtgtgtgtggtagggacgtcatacaggacgcgtggcctacgaacgtgctaaaccactggcaataaaaacacagagtgtggggccgggagcggtggctcacgcctgtgatcccagcactttgggaggccaaggcgggtggatcacctgagatcaggagttcaagaccagcctggccaacatggtgaaaccccatctctactaaaaatacaaaaattagccggccgttgtggcaggcgcctgtaatcccagctagtcgggaggttgaggcaggagaatcgcttgagccagggaggcggctgttgcagtgagccgagattgcgccactgcactccagcctgggcaacaagagtgaaactctgtctcaaaaaaaaaaaaaaaaaaaaaaggagtgtgtgccagcatcactgttttaagccttttacgtatattttcctccttgaatcacataaaccctgtgaaggaggaagtatttttatctctatttgcagacaggaaactgaggggcagagaggttgaataacttgcccaagttattcaacgaacaagtgataaacagcagacctgggattcaaactcaggctccagggtctgtgcccttcaccacgctactgccacaaaaccctagcagagccgggtgctggggcacgcgcctggagtcccagctactcctgaggctgaggcaggaggatgcttgagcccaggaggtacaggctgcagtgagccatgatcacgccactgcactcctgcctgggctgccgtgggctatgcctagctggcgtctgcactaagttcagcatcagcatggtgacctcccgggtgcaaggggaccaccaggttgcctaaggaggggtgaaccgactcagatcagaaatggagcaggtgaaaaccctgtgctaatcagtagtgggatcctgcctgtgaatagccactgcactccaggctgggtgacatggtcagaacccatctttgaaggggaaaaaaaaaagattgggcttgggggtgcatgccggtggtcccaactactagcaaggcagaggcaggatgatggcttgagcccaggaaccggaggctgaaatgagctatgatcgtgccactgcacttcagcctgggtgacacagtcagaccctgtcttataaaaaataataataataaaatataaaataaacaaaataaaatagcagtgactaaaccccaaagacatttgtaatttactataattcaagttgggaagtgggtggtcccaggcctggctgaaattcagggatggcatctagggcttccccactcctgtctggtaccctccacatgtctgagtgtccctccttgtggcaaggggacagccacaaaatgggttccctcttctgagcctctccgctctcagggaggagaaacctgcccagagtccccacccctaaatccctccagactggacaagcaccactagccggctgccttctttgggttaggccagccaaagctcacccctaagattaggtgtgctcacaggcccctgacaaaatggggtcctgttggtgaggaagaggagggacgggactggctgctgggtcagtaactggggtatttgtccccggccccaggctggaaggcattggtagacttgtacagatcacttcacttgtggggaccctgtggcacagagagaccccgtggcttgtccgggaccacacagctaagccgggcagaactactgagcgaggagcctatcagtcctggttcccaagctccctgccccagcctgcccctggcctcccagtgccttggcctgcctcacatgcctgggcttggccccaggttatcttcagagccatcccatcctgcctccctgactgaccatgccacttcccgctcaaaacctgtccatggctccccattgccctctggacaatgcccagacatgtccaacaggcctgcaggtctggccctgctaactctcacctttgtccactcccccgagtgacacaccgttgtccccagcccccaagggtacgccaattccaggcagtgctgccgggtcttctctgttggtgccttttatgtgattttttttttttttcttttgagacagggtctcactctgttgctcagactggagtacagtggcgtgatctcagctcatgcaacctctgcctcttgggttcaagcaattctcctgcctcagcctccggaatagctggcattgcaggcatgtgccactactgcccggttaatttttttattttcagtagaaatggggtttcaccaggtcggctaggctggtatcgagctcctgacctcaaatgatccacctgtctcagcctcccaaagtgctgggattacaggcgtgagccactgcacccgactccttttatgtgattgttttaaagaaccaacctctggttgtgttgaatctccatagtgtttgtttcactgatttatacctttattacatttcatcttctttctttctttcttttctttttttttgcgacagagtcttgctgtattgccaaggatggagggcagtggtgtgtttttcagctcactgcagccgctgcctcccaggttcaagcaattctcctgtctcagcctctcaagtagctgggattacaggcacctgccaacgcacccagctaatttttgtatttttagtagagatggccatgttcaccatgttggccaggctggtcttgaactcctgacctcaagtgatccacccacctcagctcctaaagtgctgggattacaggcgtaagtgtgtgtttttttagagataggctctgttgcccaggctggagtgcagtggtgcaatcatagctcactgcagcctcaaacttctgggttcaactgatcctcttgcctcggcctcccaagtagctgggactataggtaccgaccgccacgaccagctgatttttattttttatgtttttgtagagatgggatcttattatgttgctcaggctagtctcgaattcctagcctcaaggaattctccggtgttggcctctggaagtgctggaattacacgtgtaagccaccacgcccggcaaagattttattttttattcaacctgagagctccggttttaacaaggcaaattgaatctgttaacattgatggtggctgcccgtctacttggattcatttgcaaacatttagcttctgttttctttttgttattgtggagacacggtctagctctgtcactcaggctggagtgcagtggcgcggtcatcaaactatcctcctacctcagattcccaagtagctgggactacaagcccaacccaccatgccagctaatttttttttttttttttgagacagacttttctcttgttgcccaggcttgagtgcaatggcacgatctcggctcactgcaacctctgcctcccgggttcaagcgattctcctgcctcagcctcccgagtagctgggattacaggcatgtgccaccacacctggctaattttgtatttttagtagagacagggtttctccatattggtcaggctgaactcctgacgtcaggtgatctacccgcctcagcctccctaagtgctgggattacaggcatgagctaccgtgcctggcccatgccagtttttttttttttttttttttttttttgagacagagtctcgctctgttgcccaggctggagtgcagtggcgcaatcttggctcactgcaacctccgcctcccaggttaaagcaattctcctgcctcagcctcccaagtagctgggactacaggcgcctaccaccacgcctggctaatttttgtagtttcagtaaagacggggtttctccatattggccaagctggtcttgaactcctgaccttgtgatccgcccacctcagcttcccaaagtacatgagccaccgcccccggccaccagctaatttttttttttttttttgagatggagtctcgctctctatcacccaggctggagtgcagtggtgccatcttggctcactgcaagctctgcctcccgggttcatgccattctcctgcctcagcctcctgagtagctgggactacaggcgccggccaccatgcctggctaattttttgtatttttagtagagacagggtttcattgtgttagccaggatggtctcaatcttctgacctcgtgatccgcctgtctcggcctcccaaagtgctgggattataggcgtgagctaccgcgcccagcctgccaccagctaatttttaaaaaaatgttttatagagacatggtctcatatgttgcccaggctggtctcgaacttctggtttcattgcttctgttttccatttactatgacaccctttcacttctttttccttctttcttgtcttaaaatggattatctttaaatcttatttctattatttcagtagtttaagcaatatttaagattaatccatatctttattctcctccaaacaagctgggttccttagaatgttttaaaaaggatttcttgcccagtgcggtggctcacgcctgtaatcccaatactttggcaggccgaggcaggtggatcacttgaggccaggagttcgagaccagcctggccaacatgacgaaaccctgtctctactaaaaatacaaaaactagccgggtgtagtcgtgcgtgcctatagtcccagctactgaggaggctgaggcaggagaatcgcttgaacccaggaggtggaggttgcagtgaatcaagattgccctactgtactccaacctgggtgacagagcaggattctgactccaaaaataataaaataaaatataaaatgaaaaggattcctttactgtaatcatatattttattgtagttaatgttttagtttcaccttgtttttaagacttctcagtactcattgctgttattattaatattgattaaaactccactcacccttcctttgacatccagatagtctgtacctcctgatggaaaaataaaaaaaaaattccccagatcaataactgcatacaaaacccaggggctgtgcagatttactgcagggggaagactatatttggaaccggcctccattaggtgcccccaggctaaatttagcaaaatccttctcattttccaagacctattcatttccctgcactaaagaggaaaactgtataaatagggataatgtagaatagctaatgtttactgtatgctgataatgtgttcttggcatgtacattataagccacataacaatatcatgaaggcatgggctcacacttgtaatcccagcacttagggaggctgacacgggcagatcacctgggttcaggagttcaagaccagcctggccaacatggcgaaaccccatctctactaaaaatataaaaattaggccgggcaccaggactcacgtctgtaatcccagcactttgggaggccgaggcaggcggatcatgaggtcaggagatccagaccatcctggctaacatgctgaaaccccgtctctactgaaagtacaaaaaattagccaggcatggtggcacacacctgtagtctcagctacttgggaggctgaagcaggagaaggaggtgaaggttccagtgagctgagatcgtgccactgtactccagcctaggtgacagagcgagactccatctcaaaaaaaatgaataaataaaaaaattagccagatccctgtagtcccaggtatttgggaggctgagagaggagaattgcttgagcccaggaaacagaggttgcagtgagccaagatcacaccactgcactccagtctgggcaacgggagtgaaaccctgtctcaaaaacaaacaaacaaatatatcacaaaatatgtttagtgtttttgatgggtttttttcttttcttttcttttttgagacagagtttcgatctgttgcccaggctggagtgcaatggcatggtcttggctcactgcaacctctgcctctgtgttcaagcgattctcctgcctcagcctcccaagtagctgggattgcaggcacgcatcaccacaccaggctaatttttgtattttcaatagagatggggttttaccaagttggccaggctggtcttgaactcctgacctcaggtgatctgcccacctcaggctcccaaagtgctgggattacaggtgtgagccactgcgccaggtcttttcttttttcttttttgaggcaggatctggctttgtcacctaggctggagcacagtggggcaatcacagctcactgcagccttgacctccttcctgggctcaagtgatccacctgcctcagcctcccaagtagctgggaacataggtgtgtgccacaacacaagctaattttttttctttttttgagacggagtttcgctcttgttgcccaggctggagtgcaatggcgcgatattggctcactgcaacctccgcctcccaggttcaagtgattctcctgccttagcttcccgagtagctgggattacagggatgcaccaccatgcccggctagtttttttgtactttattagtagagatggtttttctccatgttggtcaagctggtctcaaactcccaacctcaggtgatctgcccacctcggcctcccaaagcgctgggattacagccatggtgcctgacctgagggtcaagtttttaatatttgtgtattagtcattgactaagggggctgcagggagggagtctctcttggtgaagtggctaccactggctgaaggcacgcgtccagaggaaggccagctgcaaaccactgaccccaatgtgcggcatctgagggacggacacgcccaggggtcaagagaacggagcctgggagtggcatccacagggtctgctgtaggcgactccagtgccttcctcttgatccctctgctcaggtgcctactccagggaggggctggctttttggattaggttggatgatgaccatcctcaagtgtctgaataaagctccttcagagtgaatgcaatggagaaagggtagtgccttgagaggatctcaggatgatagtaggaagggaaataaatgctgtaaagctaagcagccctcacccccacaaatccactgagatcttttcttttcttttagagagggtctcactctattgcccaggctggggggcagtggcacaaacacagctcgctgcagccttcacctcctgggctcaagcgatcctcccatctcagcctcctgagtagctgggactacagacgtgtgccaccatgcccagctaattacgttacccaggctggtcttgaactcctgggctcgaacgatcctctcactttggcctcccaaagtgctgggattacaggcatgagctaccacacccggcccactgagatattttctgatatcagaacctgagtttcatctttcctgcccctacccctaaccttagctaaaccaacctcctcctcccgcttcaggtcaatgtggagccctagacatgctttattcacgtgtttccctgtctttctgccctactagagagtggtcctttcggtcactacatcccccggacccgccatggacccaaccctgggtcttgggtaaatgaccagtcgagttggtgtgtcctctgcctgcccaggcccagcagcagtgaagggcacgaattatcagcacaggggcatttgcagtccttcttggctaaggaggatcccggctttgcctcctggtttctccgtccttccctagccccgctgtagcaatcatctaggattttgtggttgtttccgttactgttgctgtgtaacaaaccgctcaacatgcagtggtatcaacccaccgccattttatgatgctcacaggttctgacggtcacagtgaacaccttttatctgttccacaatgtctggggcctccacaggaaggaggggcgggctacaagctgaaatcacctgggccttcttcattcacatgcctgggcacttgggcgggagttgcccaaaggctcagctcagttgcagtgctgttgcctggactgcctgctttcctgtgagttggattcaaccttttttttttttttttttttttttttgagacagggtcttgctggagtgcagtggcaagatctcagctcactgcaaccaccacctcccaggttcaagcaattctcctgcctcggcctactgagtagctggaattaggcacccgccacctcacccagctaatttttgtatttttagtagacttggggtttcaccatgttggataggctggtctcgaactcctgacctcaggtgatccacccatcttggcctcccaaagcgttgggattacaggcgtgagccaccgcgcccagcctggattcactcttgaagccattgaatggcagctcagggcttcgatgaagagtgaatctccagaaaacaagggcagagtgacatggcattttatgttagcctcagaaatcacagaaggtcagtgttgccacgctttataggctgaagcagccacaagcctatccaaggtcaagagaaggaacagagcccacttttggctgggaaagtgggccaaataattggcagccaataatttaaaataatcagtggcatgaagccaggaggaaaggagactaagctttggaacagattttttcaaggtggaaaaatccaaggttgaagagaaaggtggacaagcagctgcagggaagccgtgagggaggcagctaaaagcagccgtctaagcagcactgccgagtcactccacagtgccaaccacacacccagtgccaaccacattctggccacggaagcggtttcactctcagactgagttgcaggggctcgcagctttgcaggtgttgtagacccacctgggccacgcccaagcctgtccctgggtttcttcagtagaggaaacatttagggtttaggccacttcgcatcatttccatcatctcatgattgaaggtcaattcgccgaggctgtcgcatgcagacacgcgtgcctggtatctcattccccctattgctcacacttcactttcccctcctcagtcccagaggccggacctccccagcttgatgtcatcctttgggtggaagggaggaaggcaggtgagaggggctctctctggaggctcctggtttctgagacaggctaattacaggcttcctaattaatgagccatggggttgcatttcatccgctgagtcagagctggtgtctgggccctgggcccaagggaagggtatcaagaatcatgggagggggaggccagcctgtgcctctgtctccccatgctgattccctgtcccctcccttttcaagcccagttctctccagcagtttagaggacattgtaggcctcagcccagctttgctcccaactcccgcctctgcttactgaccttcctgggcctgttccactgtctgcccttcacaccttcccactccaccaggaccacgcaggcctcctttggttaccgactctcacaaggttttccaacacccagtttagtttctctttcaaattggatcttctttggccacgtgtatcccacactgggggctctggagagaggcagtgcacttcggtaggatcctaatacccagagccctgggtcgtagatagggccgttcttgagcccgtctgtgcgtcctcctccccacacccttctctcccaggaactgcacacgacgagtacttttccattcacatttcaaccaggagattcatctatttacatgagactaactccgctgagcctttatgggggaagcatcttttatttttgtgcctagaggtgtaatactgaatttcaaaggctgtgctggagcctggtcatgaggttgttattccataattagactctgttgtgcctctggttctggattgcacagtggatttgaaatcaagtgaagacatttctgtaggtcgtgtaggcaatcagaggggctctttgtggtctgagcctctgtttcatcctaactccaagtggggattaaataagataatacataggcatttagtgcaatgcctaggacattgtttattcaatatataaacttttattaaagcttttgaatgcaaaggtttttaacatgcatggatggccttcaaggtctccataatctccttgataaaatcatgcatgtgtaaagcacttgcttctgggcccataggctggacacagctggcccctccacagagggtgacatggctcctcagccctgcaaagattggctctgggtgcccaggctgcctgctggtggggctggaattcttttcatattttttcaggggatctttggactagaatcctagatgtaggatggctgggtagaagggtacatgcatacgtgactcagccagatattgccacattccccgccaaagattgtaccctttgtattctgagcattagtatatgacagctcctgtttacctgaagtctcacctacagattgtgaccaaacatggagatttttgccaatctgctaagcaagaagtagtttttcatggtcctctttatttcatcatattatgagtgaggctgaacattgtttacatgtttaaaagccatttgtatttctttgtgaatctgttatttttagaagctatatgttatgggtattaaccatttaatacaggttgcaaatatattttccaagcttgtaattttcgtttttacttgctaatgaattttgccatgtaagagggtttttggtttgttttgagacagggtctccctctgtcgcacaggtagagacagggtttcatcatgttgccaggctggtctcaaactcctgacctcaggtgatccgcccaccttggcctcccaaagtgctgggattacagtggctcgatctcggctcactgcaacctctgcttcccaagctcaagtgattctcttgccttggccttctgagtagctgggactacaggcatgcaccaccatgcctggctaatttttgtattttttttagagacagggtctccctgtgttgcccaggctggtctcaaactcctgggctcaaatgattctccctccttggcctcccaaagagttggaagtacaggcgtgagccaccacgcccggctgttttttttgtttgttctattttgtttcttaaggtagtcaaatctatcagtctttttccttactgaatctgaatttttttgtttgtttgttttagatggagttttgctctgtcgcccaggctggagtacagtggtgccatctcggctccctgcaacctctgcctcctgggttcaagtgattctcccacgtcagcctcctgagtagctgggattacaggcacccgccacgacgccggctaatttttgtatttttagtagagacggggtttcaccatgttggccaaggtggtctctaactcctgacctcaggtgatccgcccaccttggccacccaaagtgctgggattacaggcgtgagccaccgcatctggcctggattttgaattaggacagttttcctcactcccaggttgcgaaggagttctctcgttttccatttatctctagttcttccatggtttcattcgcccagtgactgcagcgccacctgtggaaaggtcagttttccaccattcctgccttgcagtacacaaaatttccatgtgtagttgggcctgcctatgggtttttcattctgttctgttcatctgcctgtgtattcgtgggttagttctccccacccacaaaccaaactgttctttttcagagttttcctggctaccttgacttattcttacaaatgagctttatttttatttttttttgagatggagttttgctcttgttgcccaggctggagtgcagtggtgcgatcctggctagtgagatcacttgaacctctgcctcccgggttcaagcgattctcctgcctcagcctcctgagtagctgggattacagacgtgcgccaccacacccggctaattttttgtctttttagtagagacagggtttcaccatgttggccaggtctcaaactctcgacctcaggtgatccacctacctcggcctcccaaagtgctgggattacaggcataaaccaccgtgcccggcctacaaatgagctttacaagaagagtatctaacgacaaaggcaaatgtccatgagatagtgttagaaatagcaggcaacagacccacacactatatacctagaaatatttttttctttacagaaaaacattgaaagggaaaacatcaagatgtttgtgtggtgctcacttgatagccgggttaagggtagcgttatcctattattggtgaaaacccggagggaataaacttgaccctcccaagtcttcctcctttgtcctcaccttagtcctgtgccactctggagatcttgtcacccctcttggcacagacagagccatttcaggcacctctctgcaagggagggagtgcattacagccaggtggagcctgggtgcaccgcttctgcccagcgggggaggaaggcaggtggggttcaagcctgtctgattttgtacaccattgttttgctctcctgcccccatgggggggggggctttcctcctctcccaggtgacagttcataagagggaagggcgacaagctcttattttggcccagcactgtccaggagaactttcggtgatggtggaaatggtctctatctgtgctgtccaatataggacccacctgtgctgatcataactcccaaaacaggatccccatcaccataatcctaaatgttgaaatcctgaaagatcaaaatccctgaagtctgaaatcctaaaaatcacaatctcaaaagtccaaatttaagaagacttaattgtacctaatttcaaatctgtcacttatggtttggggattcaattagacatcagggattttagacttcagggattttgatctttagggatttcaacattcggtgttatggcctttgggactgtgtcttttgggattatggccgaaacccagtagccactaaccccatgtgactatcaagcactttaaatgtaggtggtgtgagtaatgaaccgagtttaaaaattcatttacttttaattaaatagccactgtggctagtggctactctactggacagtgcggttttcactaattcacaacccagccctgccccttccaatccagaactggaaggaaagagcctgcactggcaaacacgctgagcagccaggtgaggtgacagcaggcctagccggggggggccagctctgaagccaggacctgctcaacgaaggcccacaggagtcctgggggagaaatcagcctgaagcagcttcccaccccagtggccatcacaatggcagccagcccagcctcacaatgtcacaataccacaggcaggaggccgggcaggcaaagtggtttcctccagggcaggactctttgtctgcagacctacttacagccaccgagcgtcagaaggcccatctcctggggaatggaaaagtgcccagccgctgggaggcctcaagctggagagctacgggggaagcagggcaggtgtggggctgggagaagctactaagccccacaccccaggtgctctggggcctcgcagcccagctgcagggagatggaacactgtgagcagctgttcttcttcctggccatttggttcatctacttcttttctgatgccaacctctcttccacctactcaggggctggaagggcgactggagagccaagcccctgcgagtgaggacagagaatggccaaaggcagagccacagggtagacctttgcaccttgggaggagagatttggagaatggtgctgcctgggcccctttgcccccaccaaaccgcaggggtaccatggccctgacctgcgttcagagggccgagtcaatgtcacaggaaggggaagagacatgtgcccacagaccctgtggtcatggagggggtggaagatctctggagggcagcagggccacagcaaggctctgaggtcctgagtcttctccgtccgtggacttaaactctgcgtgtttacagctgttctgtgcctgggtccaggctctagtgagaaataaactgccttcagagccaggtgacagcaaaagaaattttattcccattttctaggggacagaaacagagcccagtggtgcctagcatgtttctggcaagggtagtgaaaagaccacttccttttgggggaagtctttcaattaagaaaaacacacgcaactcctgggggtggctccacctgtacccaggacagggcctgccactccaggggctcccaggctggattttccaccagagcagtcttgggggcaggagcctgttagaaatgcagatccccagggacctgcagcggtctgggcagtacctccaacacagctgcttaaggggaggcagtccggccctcatctgggagcgccgtgctgacgctgactgcacgctagggctctcggggttgggtggacagggtttctccgagagatgggctcccagcagccagagcacactgtgggtgtcaagctgctggtgggaagcaggctgttccctgagaccatgacagggtgaaggtgggaatcaccagcccccacactcaccaagaaatgcttttgctacatgctggggcttttttctttttttgagagggagtctcactccgtcgcccaggctggagtacagtggtgagatctcggctcactgcaacctctgcctccccggttcaagcgattctcatgcctcagcctcctgagtagctggcattacaggcacacaccaccatgcccagctaatttttgtatttttagtagagatggggttttgccatgttggccaggctggtctcgaactcttgacctcaagtgatccacccaccttggcctcccaaagtgctgggataataggcatgagccaccatgcccggccatgctggggcttttctaagaacacaagcacaccggagggtaagacaagattctggagaggcacagacccagaaagccaggggcacacaggagcctcgccagcgagggcggcacaggccatccatgcggaccctcaaatctcatgtgaaggctgcatcaaggtcagtgccaagaggaagcagagcaaagcatgtgaccacctctctgaagccatctttgtggacaaatgatgtaggaactcaaaaaaatgcaggcttggctaggcgaagtggctcatgcctgcaatccaagcactttgggaggatcgcttgagcccaggagtttgagaccagtctggacaacatagcaagaccttgtctctacaaaaaataaaaaaattagctgggcatggtggcacatgcctatagttcctgctacctgggaggctgaggtagaaggatcccttaagcccaggagttcgaggctgcaatgagttatgattgcaccactgccctcaagcttgggcaacagagaccaaccctgtctcaattaaaaaaaaaaaaaaaaaagcaactaaccccaaacccagatctctaaagtattgggtgtggactagagctctggacggcctaaaggaaaggaatgtgccggttcacagggacccgcggctaagctcaagggtaaaatacagctttacaaagcatctttaggctgttccttcccaaacgtgcttagaagggaacagggaaaggcgggtgtgttttctcactgaggttcttctagtggctggaatctgatagagtaccaagttgtagggatatggatatattttccctttggcactccataaagctaaatgttgggctgaaaaaaggatgcagcctataaacaagtatttttcctgaaaccaactgcatgaggaaacgctgcgctccccctcagggagcagtttctgaagccagctgagcacagctggcactggccagagggagccctccaccctcccaccacgtatgcccacctgcaaacctgggttctgagtccccatgcaggggacagacctgaaaattccagtttgtgtcctttcaggtcatcgacaggaatgacagcctggcaagctgcagtgactgcacacagctaccctgtgagctccacttgtgtgggtgcaggtgggcgacaggagtgtgtgacacagacaggcactccaccaggaggaaacccacagcagacgtcaaccatcgctttattaaggctgcgagtcggggggctgagtcatgcactccacagacacccccactgctcccaaggtccacttttggatgaccctgaaggcagagactcctgagatctgggccacaatctagggtgagccacccacagtgccctgctggacaggggggtatgcggactgcacgggggggccctcagcaggggtcttcctgcctagggtggggctggctccagtgggtcctgggctcaggcagggggggtggcagggaggcagggacatccccccgccctctggcctatggctttgttgccctattgccaccagcgcagaagcaatgtgctataccgtgaggtgatgaagaagagccccgggagggagcaggcagctctgtgcctggggcctggccagacctcaggggtgctgtggccctgctcctgttccccctcagctcctcccagcaatgggtctcctccagtggaggtcagtcactcagaagtggacccgcagcacgtcttggctagcaaccggccgctggcaggctgtgcacgtcatgggcagggagcgttgcttctcacccaggcagggtcggcacaggaggtggccgcagggcagctggtacaccggctcctttttgaagtagggagaaaatactcttttgcaggaggcacattcggggcccaggatgctcccaggctgctctggtaaatcaggaaggaaaacaggccagggttaggaaagctgctccatggtccaggctgctctgaggggcagagccttcccaccgtgctgctgcagcatctggcttcatccctcccgagtccatcccagtctgatcaggtaggggagtggaagcgggagagggagcctgggaacccgggaggcctcttctctatcatctttgaccaaatctcagtgcctctacgaatgcttgagaagagctggcttctgagggcagcaggcaggactgggcccttcctcctggtctcccagcaaggtttactttcccctgcgataggtggccaaggctggagcaaggcacagctcactctgacaagataaactgcaagaaatgtgagaggcgacaagagaaggaaaaggcaggtcagtggggtggctcaagcctgtaatcccagcattttgggaggttgagacaggaggatcacttgaagccaggagttcgagaccagcctgggcaacatagtgagatactgtctctacaaaaaagaaaaaaaaaaaaaaaggaaaagcagcacatggtccagtgcaccaaggttggggaagtgtgagaagggaggtcagcagagacaaggctgaggcctgcagtgcacctgccactggggcctagctcctgctcccttcagccctgcagcctgcagccccctcactgctactggcagccctgctcctgactcctcagtccccctcctgtgctgccctggccctctcggcaggctctcccttcttccgcaactccttcagggcatccttgaatgagggtcacagtgagcagctctggccatgccccaccaggctgcacccacggctcttcctttcctcatggcccctctggagagtgacaggggatgggcttgcctgtcctccttgtggtccatgtctccattcctagccactactctctggaggaccccaaaggaacctcaaaccaatttgcttcagaattgtttcttaaccccccttctctctgtccatttcatcaccataatccaggccgctcgacacatctcttcctaactattcacctgctccaggcttgtcttctcaatctgtcctcaaagctgcctccaatgacccacctatgtaacttgaccaccccataactctgctttctacctcttaggagcttcccaactttcgggacagtcaagactccctgcacggcccacccagcctcctcacctctcttcacaccagtctcaacttttagagtccagcagcttccaatcacttctttgcacactctgcgctgctggcctcctcactttgtgcttgctgttccctctgcctagaatgcccttatctggagacctggcttagaccacacccattccatgacgccaccccggattgcccctttcctgtgctttcagagcccaccagcccttctcagcctccaaggtaggatgcctacttcctccccaggctttgcaggtcctgagggtcaggactatgtccatgtttctcatccggcctcaggacctggcgcagcacctcacagggcaagtgctccatccacatgtgatgaatggacctgccatctacactcgggcaccaggcaccaaagaagggagggcaggggtgccctacacggggagcaggaactgaagtgttcctgcctccgcatccctgagaactgtagccaggaaagagtggcctggctgcgggtgttttctttgggccaaacattaagcaacataaaagtaccgggtgcctctcctgtgcacacaagccaaaaattccccagtgagtggaaagttgaacctctacagggaagggaaggagggaggaatgaaggtggggagggaggggggaaagaagggaggggaggaagcaggaggaaagagccactgactgcttttcagtggtgcccctttcatgcaggctctgccagaggcttcagagatctgcctgacccacagtgcatgatgagaatttattttccatcagttttaaaaagcacacctggcacaacaccacagaagcatgcaagggccccaattgcccccagcactgaccagaagtcccattaaaagatctcagaggcccagagccccaggggcagtttcagtgacagaaaaaaaaaaaaaaaaatcatcaaggaaaagacaattattgtgccctgggcaggatggaaacccaagtatataactgcaaactgaggtgacagagaggataaaaaagagggcttgctttgaaaagggtgggctaacatggcctcctgtaggaagagctgtgagaataaaaaggggccagccacacagaatgaaaggagagcaagcacaaagaacagcctatccgttaaagaaaaagacacagtggtcgggcacggtggctcacacctgtaatcccagtgtaatcccagcactctgggaggccgaggtgggtggatcacctgaggtcaggagttcgagaccagcctgaccaacatagcgaaaccccgtttctaactaaaaatacaaaaattagccgggcgtggtggcgggcgcctgtagccccagctactcagaaggctgagacaggaggattgcttgaaccagggagaaagaggttgcagtgagccaggattgtgccactgcactccagcctgggcgacagagcgagactccatctcaaaaagaaaagaaaaagacacagtgaagctgggtgcagaggctcacacctgtaatcccagcactttgggaagctgaggcaggtagatcacctgaggtcaggagttcgagaccagcctggccaacatggcgaaacgctgtctctactaaatatacaaaaaaaaaaaaaaaaaattagctgggcttggtggcgtttgcctgtaatcccagctactagtgggggctgagacaggaagattgcttgaacccaggaagtggaggttgcagtgagccgagattgcgccattgtactctagcccgggcaacagagcgaaacagagcaagactctgtctcaaaaaaaaaaaaaaaaaaaagacacagtgagagtgggcttcagataagactgcagaggaggagacatgggggctccagcaggcaggacctcagagggagtaggagttgaggttttatcctaagttcaggggatgccatggtaggatttgaagaagtggagcatggtgatgggctgacatgataaaaagatccaactgctatgagtatgatgagccacagtaaggcgaggatggggggataccagcaggggctactgcaggagtctgggagtgaggcagtgggagctgcagccaggggaggggccacagaaggagagcaggggactaacctgaggtcaccttgggggaggatggacaggacctgataatgaacagaatgtcaggatggggacactgaaggaactcgagaatgacttctgtgttagaagcctcaccacaagacagaagatgctgcccttacccaggtaggatgatgggggcagtgagggggaaaagctctggagggcagatgtgagcagtacagagtctgaatgtttcctttagagaggatgctgagcctggccatgatggctcatgcctgtattcccagcactttgggaggccgaggcagatggatcacctgaggtcaggagttcaaaaccagcctggccaacatggtgaaaccccatctctactaaaaatacaaaaattagctgggcgtggtggcgggtgcctgtaatcccagctacttgggaggctgaggcaggagaatcacttgaacctaggaggcggaagttgcagtgagctgaaatcgcgccatcgcactccagctagggcaacaggggcaagactccatcttaaaaaaagaaaaaagagagaggatgttgagtgctgtcagggcggcaggatgagttccaaggagaagcaggagctacaggggaacatggacagttgccggagatgtgagttttcacttgggtaacagagaatattgagattagagagtccagggccagagctggtagagaaggcaattggcaatggaaactgaagagggaccaccgaagataggagaaaagaagcaaaacagcctaaaagccaagagagaaggcgtttcgcacagcaggagctccatctcgtaaaaaatgcctcccgttgcaatcagtttctgttgctttgtatcctaatagattctggcatacaatgggggtcaaggttcattttaggcaaaattggcccataagctgccactgctctttctaagacactgacggaagtgttaatctgaagggatgaggacgacaaacccaaccaaacctctcttcacatttacataaagtgccccggatgtcagactgcagactggctagatgagaaaaaaataacaaaaaaggccaggcgcggtggctcactcctgtaatctcagcgctttgcgaggccgaggcgggcggatcacgaggtcgggagttcgagaccagcctggcaacatggtgaaaccccgtctctactaaaaatacaaaaaattagccgggcatggtggcgggcgcctgtaatcccagctactcaggaggctgaggcaggagaatagcttgaatccaggaggcggaggttgcagtgagctgagactgtgccactgcactccagcctgggcaacagggcgagatgcagtctcaaataaataaataaataacaaacaaaaaaaagagaaacaaaaatcctcaggagaaaataattaacattagatctcacaaggaaacacatcagagggtggccaagccctacatccacagaattactaaggattgactaaagaaagcctttcttgtggggagtttaagttcataggcagcccctcaactacccctggaaaaggcaagagaacaggttctctcccagggtgggtgttggaactgacggggaggctggccaggcaggtccacagagcccccagggactcggcccagcatccagagacagaaaacagaccacccattccaaggctccaaggagatggcggggcccatgttacccgagccggtgccaggcctccaggaagtgttgctccctcttgtgccaaggtgctggagctgtcccctggtcagccgtgccgtgaaggagggcatagagccaagggtggatgccaaggcaatttccaagctttgtgacagcttctgctcgtgggacagtggacctgtcgagagatgcgcacagcacaacatccagagacaggctccgcaaaagagaacagcctcaagtccttcgagggctgtaaaaacggcacctccaatctcacacatcaatgtaatgaaactccatcctaatgtctactggcggaccatgacagaacaccgggaggtaaagccctaggaacaccggcagttcctgcccatcccaccggcttcaggcttttctcctcctggagaaactgctgggcagacatgagccacctcgtggctcaactgcagaactgcacgctcctttttttttttttttttttttttgagatggagccttggtctgtcgcccaggctgagaaggagtgcaggggtgccatctcagctcactgcaaccttcgcctcctggattcaagcgattctcctgtctcagcctcccaagtagctgggactacaggtgtgcgccaccacgcctggctaattttttgtattttagtagagacggggtttcaccatgttggctaggagatctcctgacctcgtgatccacctgcctcagcctcccaaagtgccgggattacaggcgtgagccacagcgcctggcctcctttctaaaggcctccttgctggccaagaaaataactggggcaagcaaacgccagctttggactgctgctccctgccccccattccctccccagcggccttagtcttctctttccctaactccacccttctggggaccccaccaccccccagaggggttcatctgcattttctaggtgttcatgtcctctctctcctgttaagtaaaacaaagcagtttttaccgaatagaactaagaccccacgttgaccacgccacaatttaggggacctttagtgtaggatcaacagaaagccaagccatggaatgagggtgaaggccaaaggggtagggggacagctgcccaagaaagaccccagggacctgtgtggcagaaaaatttgcaatgctgtctcaaagaggagaatggaaacttttgtccactgtttgcaggacacaggacatcagctcagggccttgaaggagccctagtcagcgtggtcctgagtcaccaagtctgtcaaggccaacaggactgagacctccacaaactgacgctgaagtctaaggacctttttccttgttccaccccactgcgcctcagatgtttccaggagtttctgaaggtcatgttaactagaatttactcttaaaaccaaagacacagaaataaacgttaagcatagtatttgcatagtcttttagaagaacataggaaactaaaagaatgatcaacctaaacagaataatttccataaggaaaaagaaaaggttgccaggccaggcacagtggctcacacctgtaatcccagcactttgggaggctgagacaggcagatcgcctgaagtcaggagttcaagaccagcctggtcaacatggcgaaatcctgtctctactgaaaatacaaaaattagccaggcgtagtagtgcgtgcctgtaatcccagctactcgggaagctgaggcaggagattcgcttgaactcaggaggcagaggttgcagtgagccataatcacactactgcactccagcctgggtgacagagcgagactccatctcaaaaaaaaaaaggaaacgtgtcaaagagctaccctccacaagcaccaagcactgacaatcacaaggacttctactagacaggcagagtgggtattccaatactattcaattgttccacagcacagaaaagaaaaaattctaaattctttctatggaacaaaaaaatcatcaatgacacctgaccaaagatggcacacacacacacacacacacacacacacacacacacacactacagtccaaccccactaatgaatacaaaaatcctaacactagcaaacagaaccattaaaatctattaacaggggccaggcgctgtagctcatgcctgtaatcccagagttttgggaggccaaggcgggtggattgcctgagctcaggagtttgtgaccagcctgggcaacatggtgaaacaccgtctctaataaaatacgaaaaattagccgggtgtggcggcatgtgcctgtagtcccagctactcaggaggcagaagcaggagaattgctagaatccaggaggcagaggttgcagtgagccaagatcgcacaagtgcactccagcccgggcgacagagcgagactccgtcactatatagataaataaataaataacagggctgggcgtggtggctcacacttgtaatcccagcactttgggaggctgaggcaggcagatcacctgaggtcaggagttcaagaccagcctggccaacatggcgaaaccccatctctactacaaatacaaaaattagccaggcatggtggcgagcgcctgtaatctcagctaatcaggaggctgaggcaggaaaatcacttgaatccgggaggcggaggttgcagtgagcagagattgcgacactgcactccagccagggcgacagaatgagactctgtctcaaaaaataaaaataaaaataaaaaaaattagccagtatggtgctgtgcgcctgtagtcttggctaccgaggcaggagaatcacttaaatcccagcagcagaggtcgcagtgagcagagattgcgtcactgctgcactccagcctgggcgacagagggagactgtttccaaaaaaacaaaacaaaaagaaaccattaacaggccgggcactatcgctcatgcctgtaatcccagcactttgggaggctgaggcaggtagataacctgaggtcaggagttcaagatcagcttggccaacatgacaaaacccagtctatactaaaaatacaaaaattagctgggcacggttgtgggcacctgtaatcccaactactctggaggctgaggcaggagaattgcttagaccaggaggcagaggttgcagtgagccaagattgtgctattgcactccagcctgggtgacagagtgagactctgcctcataaaaatacaaaaatcagccaggtgtagtggctcacacctgtaatcccagcactttgggaggccgaggtgggtggatcatgaggtcaggagatcaagaccatcctggctaacacagtgaaaccccgtctctactaaaagtattaaaaaaattagccaggtgtgctggcgggcgcctgtagtcccagctactcaggaggctgaggcaggagaatggcgtgaaccagggaggcggagctggcagtgagccaagatcgcgccactgcactccagcctgggcgacagagcgagactccgtctcaaaaaaaaagaaaaaaaatcagccaggcgtgttggcacgcacctatagtcccagctattccagaggctgaggcatgagaattgcttgaacccgggaggcagagattgaagtgagccgagatcacaccactgcactctaccctgagtgacacagtgagactccatctcaaaaaaaaaggaaggaaggaaggaattatttaggttgaattacacagaagtttgtcactgatctgtgttctcgaactaagaaatatgaagatggaggctaagaaatcatttctcttaatattataaataagcaattaacaaataccttgggaaaaataagaatacaatagaagtgaggagtgtgactttcaagattacattctaaaagatggatttccctcgtctgtgcactctctctggaacgcacagctcccacacagtacactgccctatggagaggcccacaaggcaaggaaccgagggcagccttgggccaacagccaaccagcaagtgaggcctcagtccaacaatgcatcaacgagctgaatcttgcaacaatgatgtgggtgagactagaagtaaatgcttccccagttgatccttgagatgaccacagcctcagccaccagtttgatggcagacttggaagaccctgaagcagagaatccagccaagttacgctgggatttgtgatccacagaagttatgagacaatgaatgtttgttgctgtaagccagtaagttttggggtaatttgttacctagcaatagataaccaatacttctttaacatgataaaaacatctatctcaggccaggcgcggtggcttatacctgtaatcctagcactctgggaggctgaggtgggcgaatcacctgaggtcaggagttcgagaccaacctggccaacatggtgaaaacctgtctttactaaaaatacaaaaaattagccggtgtggtggtacatgcctgtaatcccagctacttgggaggctgaggcaggagaattgcttgaagctgcgaggcggaggctgcagtgagacgagattgcgccattgcactccagcctgggtaacagagtgaggctccatctcaacaacaacaaaaaaacatctatctcagcctaagatccaacatccagcttgccctgaggtattcacactgaacacattcagctgcagaggtcacccagtgaaccagggctgctcacctcaggagagagcagcatcaccggccctagaaatcactggcaatgccccagggaagaggcaggaagccaggatccttaaatctcatactcaagaatgttgcaggccaggcacagtggcttgcagatcccagcactttaggaagccgaggcaggtggatcacgaggttaacaggttgagaccatcccgggcaccatggtgaaaccccttctctactaaaaatacaaaaattagctgggcgtggtggcgcgcgtctgtaatcccagctactccagaggctgaggcaggagaatcacttgaacctgggaggcggaggttgcagtgagccaatatcacgccactgcactccagcctggtgacagagcgagactccatctcaaaaaaaaaaaaaaaaacagaagtcgagtgcagtggcttacatctgtaatcccggcactttgggaggccaaggtgggtggatcacaaggtcaggagattgagaccatcctagctaacaaggtgaaaccccgtctttactaaaaatacaaaaacttagccaggcgtggtggcgggcgcctaatcccagctactcgggaggctgaggcaggagaatggtgtgaacccggaaggcagagcttgcagtgagccgagatcatgccaccgcactccagcctgggcgacacagcgagactccatctcaaaaaaaaaaaaaaaagattgttgcaattttacctggtggatcctgccaaatgcaataaagaagaaaaacagaaaaaaacacaaagagaatattgcaatttgtccacacatttactgagtgcaccctcttcagtgtggcttttctcttcagtaaccctctcctgaaaggaaggcccacagacctagtcctttttccttttctgtgtcctcatgccacatggtgaggggggcgcacagagaacctccatgcaatatatccttgtacctctgtgacggttagaaataacacccagaggagcccactgtcacatgagtaacacaaagaaggcaccagaagagattctctgctttgagggactggtatctttcctcccagcagctctgaccagaggcttcaagcccaggaaaaagtgttgaccaggccagggcacataaagggaccccaaggaaggcaacagtgcccatgggaccatcaccaacagaggagcgaaacacgcagactgaagcctcggaacagatgagaatagacgagaacacatggaacccctccaaggctccaggttgtccctggtctgaagacaaagctgaggggccccaggatgggaaacgggaaggaggcagcacaggcacagcctcgggaatgtaagctggccaagcacaaagcaaagggcagcagagctgagagctcctgggaaggagatggatgagcctggctgcggacacaggatgctgaattacctgtcgagcagtccatatgtgtcaggctgggctcattggtggctttcattttcttagcagtgtgctctgaggtagtgggtaagaccaaagggcttgtggcagaaaaacaggaagcatttacaccaaagttactgtctgggacatgttcagcctgctctatcttccttttctgagagggcagaacaatggaagaagggatcactgccaatgccgtctgtgctctcccaagcaggtggcagccagggatggagtgctggagcaggaaatggtcaatccgggccttgagggaggggtgaggcaggggctgagagtgcggagtaaaagctacccccgtgaaagggtcactgggcactcggccccatgtggcttcactgcggttacacttctccagtgtgctctggtcgatgaccttgcctgagggcagcagcatgggacaaggcatgatctccagggtgatgggatccaggaactcctcaggcacatcctgaatgatctcggccagcttctgcaggctggagggagcctgctggctctcaggctggtccccagggtcacagtcactttccatgggcaaggctggagcctgcagagccacatcctgaggcaggttctctgaggtgaccagcaggatgctgtctatcacttcctgggagcaggtcttggccggctgaccccacacttccaaccgcttgatacaagggataccgccgcctgtcacatgggtgatacagatccttaagtgggccacgtggctaagggaaagagcccctttattccagagctcctgggccacaacagcaggggaggggagtgtggcttccatcgcgccaaaagggggcctggccttgaagcccctgtggctaaacaccacttggctctggtttttcagtaagactttgcctaccaaggtgaacgcctccttgtctgggacagatggctcagctgggcccagggtccggcactggggcgtattccaagacactctgctagatgaggcagatgtgtacatttccaggccagtgacgttctgacctcccccagctgtgaggtctatgttgatcctacagatttccacattaaagggaaatgaaactgtcacatagactggtggcttaatgaaatactctgtcctgaaaccatgacttctctttgtgagatcttcagagatgagattttctacttcgtaaccatcagctgatatctagatttaataaaaaacacaagatacaatgatccaaatgaagacaacttgtcacttgtaagaaaactcttaagcctgaggttcctcgttttaaaatttcctctattaaactgaattgtcccagatcagggcacccaagatcagatcaaaggccaagggcaattgtcccagatcggggcccccaagtattgcccaaccttaaaaatatgagcaactgagctgggcatgttggtacacacctgtagtcccagctactcaggaggctgaggcaggaggatcccattagcccaggagttagataggcctgggcaacatagcaagaccccatatcccttttccctgccaaaaaaaaaagcaagcaacaaaatcctgcccaatccaaccaaaactcccttcaaaacagtatctggggagagaagtgcaggggagagaaagtatttctacctttgctatgactttgacgagactggagattgatcatcaaagaacaaagagcacagtgaagaggaccctgcacaaaatgagtcacagctcacctcaccatggcgctgtgtgattctagaggtgagcctgccccatgcttacctaaataccatctgatggaatctaaagtaacaagagcaaaagtgcagtaagcctgaatcaaatccacacacacaaggcaggaaatgatgaaacacatgacaaacatagcatatatttatgtgtatatatttgttttgtttaccttgttgcagtgaattcttggtctgaactgtgggaggcaaagatttattaccatctttgtggctgagaggatatcttccaagcatcagaagcagccttaaataagaaataaaactatgtattagaaaatgtaaaattcaattctaaactttcagaagttgattcttaagagaatcaaacaggatggcaacaaaaacttgaacacacacactctcacggtccacactgactttccttatatcctatacatgatgttggggaaaaattagtcactgaaaaattatagagaagacttctatggcaggctcaacaggttggcaaagactgccagttctctggccaacagctgttccaaagacccaatggaggcaaggcccatcagctgtgctgggggttgccacaggaagggagtggcaaaagtatctgagctcagagaaaggacagagtgttcggaatggaaagggtcataaaaaataattatagtggtggtaagcatccttgtcatttaatacttgtcaatgcaattatgttttcttattaaaatgaaaacaatgagtcaaaaacatcattattgagacatagaaaatttattagaggccaggtgtggtggctcatgcctgtaatcccaacaatttgggaggctgaggtggtaggactgcttgagcccagaagttcaagaccagcctgggaaacatagctggtcttgttgtagagaccccatctctacaacaaaacgttgtagggatcttgctatgtctgatatgcacctgtagtcacaactatttgggaggctgaggtggatcacttgagctcaggagttcaaggctgcagtgagctatgatcacaccactgcattccagcctaggtgacagagtgagaccctgtctcaaaggaaaaaagaaaagcctctcccctctcccctctcccctttcttcggtctccctctgttgccgaggctggactgtactgccgtgatctcagctcgctgcaacctccctgcctcgggctcccgtgattctcctgcctcggcctgccgagtgcctgccttgagtgatctgcccgccttggcctcccgaggtgctgggattgcagacggagtctcgttcactcaatgctcaatgttgcccaggctggagtgcagtggcgtgatctcggctcgctacaacctccacctcccagccgcctgccttgacctcccaaagtgctaagattacagcctctgcccggccgccaccccatctaggaagtgaggagcctctctgcctggccacccattgtctgggatgtgaggagagcctctgcccagctgccccatctgggatgtgaggagcacctctgcccggccgccctgtctgggaggtgaggagtgcctctgcccggccgccaccctgtctgggatgtgaggagcgtctctgcccggccgccctgtctgggaggtgaggagcgcctctgcccagccgccaccccgtctgggatgtgaggagcgtctctgcctggctgccccatctaggaagtgaggagcgcctctgcctggctgccccttctgagaagtgaggagcgcctctgcccagccgccccgtctgggaggtgaggagtgcctctgcctggccacccatcatctgggaagcgaggagcgctgctgcccggccaccccgtctgggaactgaggagcgcctctgcccggccgccccgtctgagaagtgaggagcacctctgcctggcagccaccccatctggtaagtgaggagcatctctgcctggccgccccatctgggaagtggggagtgcctctgcccggccgccccgtctggaggtgaggagcgcctctgcctggcagccaccccatctgggaagtgaggagcgccactgcccggctgcaccatctgagaagtgaggagtgcctctgcctggcagccaccccatctgggaagtgaggagtgcctctgcccggctgccccgtctgggaggtgaggagcgcctctgcccagccgcccatcatctgggaagtgaggagcgcctctgcccggctgccccgtctgggaggtgaggagcgcctctgcccagctgccccgtctgggaggtgaggagcgcctctgcccggccgcccatcatctgggaagtgaggagcgcctctgcccggccgccccgtctgagaagtgaggagtacctctgcccggccgcccatcatctgagaagtgaggagtgcctctgcccggccacccatcgtctgggaggtgaggagcacctctgcccggccgcccatcgtctgggaggtgaggagcgcctctgcccggccgcccatcgtctgggaggtgaggagtgcctctgcccggccaccccgtctgagaagtgaggagcgcctctgcccggcagccgccccgtctgggaagtgaggagtgcctctgcctggccgcccatcatctgggaggtgaggagcgcctctgcccggccaccccgtctgggaggtgaggagcgcctctgcccagccgccaccccgtctgggaagtgaggagcgcctctgcccggctgccccgtttgggatgtgaggagcgcctctgcctggccgccaccccgtctgggaagtgaggagcgcctctgcccagccgccccgtctgggaagtgaggagtgcctctgcctggccgctgtgcaatcttccaagtgtgaagtgacagcctttctgcaggtgtacccaatagctccgaagagacagcgaacatcaagaacgggccatgatgacaatggcggttttgtcgaaaagaaaagggaaatgtggggaaaagaaagagagatcagattgttactgtgtctgtgtagaaagtagacataggagactccattttgttctgtactaagaaaaattcttctgccttgggatgctgttaatctataaccttacccccaaccccgtgctctctgaatcatgtgctgtgtcaactcagggttaaatggattaagggcggtgcaagatgtgctttgtcaaacagatgcttgaaggcagcatgctcgttaagagtcatcaccactccctaatctcaagtacccagggacacaaacactgcggaaggccgcagggacctctgcctaggaaaaccaaagacctttgttcacgtgtttatctgctgaccttctctccactattatcctatgaccctgccacatccccctctccgagaaacacccaagaatgatcaataaatactaaaaaaaaaaaaagaaaagaaaaagaaaaaaaaaagaaaggaaggacagaaggaagtaagttgggcagggacagaaagaaagaaaaagacagagaaagagagggagggagggagtgaaggaggaagggagggagggagagaagacagagaaggagggaagagagagagggagggagggaagaaaggaaggaaaagaaagaaagaaaatattagggttggaaagcaccttaaaatgacatctaggcctggcacggtggctcatacctgtaatcccagcactttgggagacagaggcaggcagatcacctgaggtcaggagttcaagagcagcctggccaacatggtgaaactccatctctactaaaaatacaaaaagcagttgggcatggtggcaggcacctgtaatcccagctactcgggaggccaaggcaggagaatcacttgaacccgggaggtggagtttgcagtgagccgagattgcgctactgcactccagcctgggcgacaagagcaaaactccgtctcaaaaaaaaaaaaaaaaaaaaaaaaaaggacatctaatgcaagtagtcattttaatggccaattccaatggcttctggtaactctgtggagaaggagggaagccactgaaaacacccctcgcagtggcagacctctccagtggaactcaactccttggtgaggccagccagccatttatgcttttctccctgacagtcgtggccatgtaaaattgttagcccgacagggatagggtcaccctctgggccccttttgctgtcaaaatcagtaggagccacttgcaggagccaggcatactaagcgtcctgcaacatctgagtggatagttgctgcacagtgaagatctgtcatgggccttgtaaatgtctattatctcagcttagcccctaactcagttttacatattaacacaaagtatttttaaacatggttttcatatatgctaaattttctaggaggggaacttccatgtaagccagaggaaggtcatatattgttttgttcagacctttaccaagagatgcccaccatttctgaaaatcacatcaccgagagcaaagctctccacctcggtcagtctgcatttgtagcagtctgcattccacatgcgctcctgcgtgatggtaaaagcttctgaatacttctttatgccttctagtatggtcacacccaaacatttatacacgagaataaattttattatcatacctaaaattttttcctttaaagtactgttagggcattctgtgtgttggtggggggagggtgtgtatgtgtgtgtggacctacacacattagcgtgtgtacataagtaggttatactatttggctttaagttcatcatgatagaagaaacatgaatctcatggggtagaaagcccctggcctaaagcctcctgttctttgtgagcctgtgttgaaactcctagtgcttcccactttgaggcacatacacctttgctttgccagagaattttagaatctggcctggcatccacatggactaaagtttctacaattccttttctgaaagattatattaacaatgtctccaggcttctgatacctttcgtgttctccacgataagtaaaaacaaatgaagtatctgatgcattgtgtctacaaatatcctcagaagccctatagttacctctttttggccaggacaccagaactcatttagagcagcatttcccccagcttccctgcccaactagcatagtagcttcctgtcggtttgttttaaatgtaaaattaagccattcactttaattgaatatagaaccattaaaataaatatatagccaagccaatgaaataaaacattcctccttggaaaagcaagcctaggatgccaaaggaaagcagacaatatgctactgacatagatgatgacactagagacagacatatgcagaacggtgctggccccaggcagatggctgaggttggggccctgggacttgagagggttttcttttcactgctccaggcagttccctcttcccctcttggccctgacagaaagccaagaaaaaacaaagccgggcggagtggctcacacctataatccgaacactttaggaggttaaggtgagaggatcacttgagcccaggagttcgagatcagcccgggcaacacagcaagaccccgtctctacaaaaaaataaaaagattagttaggtgtggtagcacacacctctagtcccagctacttgggaggcggaggcaagaggatcacttgaagccaggagtgcaaggttacagtgagctatgactgtgctattgtactccagcctgagtgacagtgagaccctgtctcaaaaaataaagtaaaataaaataagagttcttctagacttaaatgtggttattatgctctatgatatagaaatgtggaaaccttgactgccctttccaatatgtgttagatcagacctgaaattaaggaaaatcttggtatacccttagctacttcttcccacctctgtgtggaagcgagtcagccttctgttcaagcatctcagctcatgaggcttctccacccgcgtcaggggctgtcaactaccccagtcaactacaaaagcatatggacctaaccctgaccagacacagactacctgctctccacagcactcatcaaaatataagttgagggaacatttacagaagagtgttcagtccagccccgttacatgctccttggtgctggtccaagtagcttctcttgcctcttgtctggcactcctcgtggctgctgcagatcttatcccacaccactatctgacagatttcttagcagttttgatcctcaccagttgcaaaaataaatgtaacacattgataaaaattcagtggccgacttgtgacgattcataggacaccagagtagcaggacatatcaggtgataaccataattttaatctctaaaatataccactccattgagctgaccctcagaccagtgcaccggcctatcctcatgttcatcccagccacaaccatcaccaccctcaccaccccctgcaaatactcttcaccaagctactcattggcactgtgtgacaaggaacttcaataagaaacagctctttaaagtcagttactgttttgtttagtggacaaaatgatcattgtctgttctatatggtatcctctcttggagacccataagaaaattttctctttggtctcagtactagaagagttgtttatcgcaagcaattcaatattttatggtatgaatatggatcacattccttcttgactctggctgttagaaagctccgaataaaatctgtggcccatccctcaaatttctccctacctgaattatttatttttatataatagagcataatatgtaaggtagcttaaaataattttggaacaaagtggggtataaatatgctgggcataggggctcacgcctgtgatcccagtactctgggagaccaaggcaggaggattgcttgaggccagaaatttgagaccagcctgggcaacaaagtgagatgccatctctacaaaaaattttaaaaatattagctgggcatggtggcatgtgtccgtagtcccagctactcaggagtatggcttgaccccaggagtttgaggctacagtgagctatgatcacaccactgtactccatccagactgggtgacagagtgagaccctgtctccaaaaataaataaataaataaataaataaataaataaataaataaacaaacaaagagggtggggggcataaataattctccttttgggagacatttaggttgtttatgccttttttttttttttttttaaagacagggtctcactatgttgcccaggctggagtgtagtggctattcacaggtgccattacagtgcaccacagcctcaaattcgtgagctcaagcaatcctcctgcctgagtgccccaagtcctggaactacaggtatgggtcaccaaacccaacttgtttgcaactttttactactaccttaagatcaaaatcttaagtagatttttgtcattattttttcctttagtacaattttcacttttttactcaaggggtcctacatgtttctagttaaggttgctatttatgaaaggttcttcttaacccattaatttttctaactggtcattcctatataggaaagcttttcactttggtatctttactatatgttcagctgtcttattgaactcttattgattttaacacattttcagttgtttttgctttttttttttttacaatcctattatctcaataatgagaattcctttctcaaaatggtaactcttatttctgtctctcatttactgcattagccagaacttccggaattacacaaaacagtaagacagttgccatcctcgtttgtgcccattagaaaatgcctctttgggccaggcgcagtggctcacacctgtaatcccagcactttgggaggccgaggcgggcagatcataaggtcaggagttcaagaccagcctgggcaatatggtgaaaccctatctctatgaaaatacaaaaattatccaggcatggtggcgtgagcctgtagccccagttactcgggaggctgaagcagaagaatcgcttgaacctaggaagcagaggttgcagtgagccgagatcatgccactgcattccagcctgggcaacagagtgagactccatctcaaaaaaaaaaaaagaaaatgcctctttgaacataatgttgattgttagattgaaatatcatctttatgttaataaagcattctaattttcatattttttgaagtcaggaatatgctctgaattctgatttttctctatatattgtcttttattatttatcttatctgacagactaatgggatacattaacacttttttctaattttaaaccatcctttttattcccaggagagattctatttggttgtagcatattgttctttaaatgtactgtactactgaatttattttgctcatatttaattttagatgggatattattgcacattcatggaacatttgcaagccctgtgctaggcactggagtatagagataaaaatgaaatggcagtgaaactattctgtattacactgtaatggtagatacatgacattatacatttcaaaacctatatattcaaaacctgtaattcaaaacctatagaattatacaacacaggctgggcgtggtggctcacgcctataatcccagcactttgggaggcaaaggcgggcaaagcacttgaggtcaggagttcgagatcagcctggtcaacatgatgaaaccccatctctattaaagataaaaaattagccgggcaaggtggcgggcacctgtaatcccagctactggggaggctgaggcaggagaatcgcttgaacctgggaagcagaggttgcactgagccgagatcgagccactgcactccagcctgggcaatagagtgagacactgtctcaaaaaaaaaaaaaaaaaaaaaactgggcgtggtggttcacatctgtaatcccagcactttgggaggccaaggcgtgaggatcagttgaggccaggagttcgagaccagccttgccaacatggtgaaaacccgatgctactaaaaatacaaaaattagctgggcatggttgcgcatgcctgtaatcccagctactctgaaggctgaggcaggagaatcacttgagcccaggaggcagaggctgcagtaagccgagatcacgccactgcactccagcctggacaacagagtgagaccctgtctcaaaacaaaacagaacaaaaacaaaacacaaagaattatacagcacaaagaatgaaccttaaattataaacttaataataattaatcaatattggctcattagttataagaaatgtaccgcactaagatgttaatagcattaataatactcaatttttaggtaaatctaaactgctctaaattataaggtgtattaataataataataacaaagaaatggctgggtgaaacgaggcgtgattggtcatgcctgtaatcccagcactttgggtggctgaggcgggcagatcacttgaggtcaggagttcgagaccagtctggctaacatggcgaaatcccgtctctactaaaaatacaaaaaattacccgggtgtggtggcaggtgcctgtaatcccagctacttgggagagtgaagcaggagaactgctggaaccctggagacggaggttgcagtgagccaagatagcgccactgcactccagtctgggtgacagagtgggactgtctcaaaaaaaaaaaaaaaagaaatggctgggtggggttgtgtacacctataaattccagcactttgggaggccaaggcagggggattgcttgaggtcagaagttcaaggctagcctgggcaacatagcgagacccagtctctacaaaaaaaaaaattaaataattaataataataaagaatgattgggggaaaaagtgattgaaaacaactcaggactgaagatcaaattgaaatatgcaaattgaaacgaatgagtgtgttgtcacaggagaatggcagatcttttttaaaaatatcttacaaatgatatgtttctgtgggaaacagtgatgtccaaacagtaggattccgtaagaacctggttgctatcaaagtctttaataggtataatctcatcatctatcttgttccaataccctggacttttaaggtcagatgccttctgccttaacagaaaaaaaataatggctcaacatatgaaaatgcaaacagcctagcccagaaagacggcctccctagtcctgctgaggaaatggccatgtaacttgaactcactgcaaacactgtccagtacttacaaagcatagccactttctccagatgtggcatctaagtacaagaaagacaaggcttgagtataacttaatctaaaacctcagattgtggctaatgtgccctgctttcagagaagtagcttggagacagataataatggcattgtaagatggcaatacagtttataagaaaaaaaaaagaatataaaatagtagacactcttgtacctaccacctagatttagcaaatgttaacattttgctatgtttgcttctgatttcagtgttaaaagcaatatttaaaagataaaaacaaaacccagcacctatcctatttcctctctctttttgccaaggggtaagctctttttttttcttattttttttgggggggggaaacaggctctcactcccatgcccaggttggaaagcagtggtgcaatctcggctcactgcaacctcaacttccagggctctggtgatgggtattctcctacctctgcctcccgagtatctgggactacaggcgcgcaccaccacatccggctaatttttgggggttttttgggtagagatggggtttcaccatgttgcccaggctcttctcaaactcctgggctcaggcaatccacccaccttggcctcccaaagtgctgagattacaggtgtgagccaccttgcccggctaaggtaagctttatctaatgttgtctgtcattcaaatcagtataggtatgcatatatatatataaactacatatagtagtcatgtattttaatataccttaatgataatatattatgtgtatcatcttgcaacttgcttttccattaagcattatattaaggttttccatattgaaatgtttacatttggtgtattcattttaacttcctcatatttaattgtatgactaaaacagtttctccactgccctattacttatgttgtttaaaattttttactatgaaaaaaatgctgcaataaacattctctacaaatcttcttgtgggaaaaataagaaatgaaatgaacggccttctctgtgagtcatgagacaataaagacttctttctaacagtgattatataatagaatatatgcttgaacccgggaggtggaggttgcagtgagctaagttcgcaccattgcactccagcctgggtaacagagtgagaccccatctgaaaaaaaaaaaaaaaaaaaaggccaggcgtggtggctcatgcctgtaattccagcactctgggaggccagacaggcggatcatctgaggtcaagagttcaagaccagcctggccaatatggtgaaaccccatctccactaaaaatacaaaaattagccaggcatggtggcgggcgcctgtaatcccagctactcgggaggctgaggcaggagaatcacaatcacttgaacccgggaggtggaggttgcacttggccgacaccgtgccactgcactccagcctgggcaacaagagcgaaactccgtctcaaaaaaaaaaaaaatttatatacataatataaaggtaacagagcattctgcggatgacacagtaaggaaagataacctagatcaatgtttttcaatttgtggtttttggaatcaagtaatgggttaaagaaaagaaataattagaagagaatacaaaatatgaaggtgcaaatagtatggatatgtcatgaaattgtttcagttttgtacaaatatatttaacaaatgcatgtatatcatctaatataaaatgcatttcttattgtgacttgataaaaaaaatttttttaaaaaaacgttggtcaaaagttttgaccaaaacattggtcaactcaggggaaaattcacaggagtaaacatgtgaacttagggtgactaggacacatgcctgatctcatggacaactctgaagagggacagacactccatattaatgctaccacagactgtagactacaggagccaagaggtgagaacatgaacaaaagagaaggagccctggggaaagggatcaggaagtgtcaaggcacagaggagggaagtgtgaggctggttcaggagatgctgaacatgccacttagctatggaggtggagtaggagccacagctgggaaggcaaacggagccggatgaggaaggccttgaacgtcatgccaaaaagtttagactacttcacttagtaggctgaggtagtgtttcccaaactgcaggttgagaattaagaacttaaattaccgagccataactagtatttttaaaaattaagtagaatagaaaatgtcagcatgcaccacatacaagggtgagcactgttttgtgaaagttttgtttcagttacatatatatgtgaacacacaaacacacgcaattattcatttggggttttgatgtaaaagttatttcttactaaaggttgtagttaaaaaaaaaaaagttgaaagctactggtcagaagtaagtcatcggtgaatcattatcagtatcagtaggctggttatgaagttctagtatagctatgcaagatgttacagccaggcacggtggctcacacctttaatcccaacactttgggaggctgaggtgggtggatcagagagagaaatgacactaatgaaaagtctgctattaacctcctagatgacaacagcaattctgaaccacttagaggcaattcacccttcaagaggtcaatttcccttttctctggctgatgtgttccccactatcttttctgtactacatgaggggctcctggcaaatggcttcctgaagacatcaaagatgagtaccaaggtactaactacttaggaataaactggtaatcccatttttccttcggcattttcttcctttagtttttctctttttattctttttttttttttgagggaggggcattcttcaaaaggaggaaaatgaactatgtataatgtattactgagcatctcacaaggatttcaaagctactttctaagagattgtttatttttattttttattttttttgagacagagtctctctctgtcacctaggctggagtgcagtggcacaatctcggcttaatgaaacctccacctcccaggttcaagcaattctcccacctcagcctcccgagtagctgggattacaggcatgcgccatcacactcggctaattttttgcatttttagtagaaatgggatttccccacgttggccagagtggtctcgaactcctgacctcaagcgatccacccacctcagcctcccaaagtgctgggattacaggcgtgagccactgtgcccggccttaatattactattattttgagatggagtcttgttctgttgcccaggctggagtgcagtggcatgatctcagctcactgcaagctccacctcccaggttcacgccattctcctgcctcagcctcccgagtagctgggactataggcgcctggcaccatgcccagctaattttttgtatttttagtagagacggggtttcactgtgttagccaggattatctcaatctccttacctcgtgatccactcaccttggcctcccaaagtgctgggtttacaggcgtgagctactgcacccagtccctgtttttctgagacagtgtctcactctgatgcccgggctggagtgcagtggggcaatctcgactcactgcagccttcacctcccgggttcaagcaatttttgtgcctcagcctcccaagtaggtaggactacaggcatgacccatgcctggctaattttcgcattttcagtagagacagggtttcaccatggtagccaggatggtctcgaacttctgacctcaagtgatccacctgcctcggcctcccaaagtgctgggattacaggcgtgagccaccacacccaaccagaaattgtttctttttaaaagatctaattaaacttttaaagataattgtagactcatgtgtagttgttaaaaaacaatacagagagatcccacatactctttcaggctcactgcaacctccgcctcctgggttcaagtgattctccttgagtagctgagattacaggtgcccgccaccatgcctggctattttttgtatttttagtagagacggggtttcaacatgttggccaggctggtcttgaactcctgacctcaggtgatccacccacctcagcctcccaaagtgttgggattacaagtgtgagccaccgtgcctggctgtaacatcttgcatagctatactagaacttcataaccagcctactgatactggtaatgattcaccgattttcagatttcaccaggtctgcatgcattcatttgtgtgtgcctatctaattagttcagtgcaattttactctatgtgcaaagttgggtaatcacaaccacagttgatacagaacacttttatcacaagaatttcatgttatcctttagaaagtcttttatcttataaatccaaatactctacttccacagaagtcttgaaatttttcacccagatctaagccttggctgaagactccagttaagctcactgcccacactgtaagaaacaaacttgagtgacacatttagtcttggcattcatgtcacttaaatgataaatataactatgcaggaaaatgcaaaagtatatataggctgggcatggtggctcacgcctgtaatcccggcactttgggaggccaaagtgggcagatcacttgaggtcaagagtttgagataagcctggccaacatggtgaaatgctgtttcaactaaaaacacaaaaattagccagccatggtggcgcatgcctgtagtcccagctactcaggaggctgaggtgagagaatggcttgaacctgggaggcggaggttgcagtgagctgggatcacaccactgcactccatccagcctgggcgacagagggagactgtctcaaaaaaaaaaaaaaaagtattatgaaagtattatgatcatacatttgttaaaaatctatgtctaggaatatgtatacataaatagttggagaggtaatggtgggcatgcagaaatgtaaacatccgacatactaggctggtgggataagttgttcttcttttccttttatgtattgaaagttgatgtatgcctgaggtctcaggataacagcggagaagactgagatttatgttcagagtactttttgcagctgccagtactagggctcagaaagggaagtgcaagggaagggccaagaagggatccaggagttgagtggccaactgtcttggcatacccacagctaaggagttttccagaacatagtacttttggtgctaaaacctgggcaaacttggaagagttggttgccctgtctcgaaggttgttgtctgtgcttccttggagcttgaagcaaccaacaaaccttttgtttttggtgttgaggttcagcacctgggggtagggaagtgtggaaggataatttagaagagaataaggtgaccatgacactttctgaacacctcagcatccagcttccttcagcctacaaagttaccatagctgcgttatacaatctgattttgagtctcatagagatgtaatgaaaagtaattctggcagacacacatattttaaagactagactcaaacaggttacagaagggaaaaaaaagaagaagaaaagattacctgtcaagtaagagaaaagcatttcacctcaaagagtgggtggaatatcaatgcactgagcaatttcataaattgggcacttcagcttttaaagaagtgcactacttcttataatttctaaattgagttacctgtccatccatgaaaaaagtttgactcatgtgcctttttcttacaactggttaaaatgaaagacagttgtcccagcccatcccacacagttacccaccagtgagaggtatgcaaaaaaaccagaacacaggttagagccccaaagaagcctgcagttttataccacgtggagccaagtcaccctctaagggcttaacatgtgctaggcacaagtagactcagtttttcctctttatttttaatttttatttatttatttatttattgagacaagagttttgctcttgttgcccaggctggagtgcaatggcgcgatctcggctcactgcaacctccccgtcgtgggttcaagcgattctcctgcctcagcctcctgagtagctgggattacaggcacccaccaccacacccaactaatttttttgtatttttagtagagacgaggtttcaccatgtttgccagcctggtcttaaactcctgacagcctggtcttaaactcctgacctcaggtgattcacccaccttggcctcccaaagtgctaggattacaggcgtgagccactgcacccaacctatttttattttttgagacggagtcttgctgtgtcacctcggctggagagcaatggtacgatcttggctcactgcaacctccgtctcctgggttcaagcgattctcctgcctcagcctcctgagtaactggtattacaggcatgcaccaccacacccagctaatttttttatttctagtagagatggggtttcaccatgttggccaggctggtctcgaactcctgaccttgtcatctgcccacttgggcctcccaaaatgctggcatcataggcatgaaccaccacactcggcctttttactttttttttttttttttttttttttgagatggagtctcactctgtcacccaggctggagtgcaatggtgcaatctcagctcactgcaacctccacctcctgggctcaagcgattgtcctgtctcagcctcctgagtagctgggattataggcacacaccatcatgcccagctgatttttgtattttcagtagagatggggtttcactatgttggctaggctggtctcgaactcctgacctcaggtgatccgcccaccttggcctcccacaatgctgggattacaggcgttgagtgagccaccgcacccagcccagtttttacgtttaagaaatgtataggctcaaaacaaggcacagataagccgtctttctcctgagagactcagtctcaaaacaagatctacaaaggtttttactaccatttactcagcaccttagtaacagtgtcagcaaaattctacgggaacccaggtgaggtggccagtctctccaacataaaacctgaccctaaccctaaccctttccctctcctccatggcctactccatctgctcttgcttctctcctgaattttcaacttacctctgactactgaaacctatcgtcaacatgtaaacacattcaaggctcttctgccaactcctcccacaaaaaaccacgctggtttaatggtgcatctttcttagggttaccagatttttttttttcaacttttattttagattcaggagacacatgtgcaggtttgttacctgggtatattgcatgatgcttaaggtttggggtacaaataatcatgtcacccaggtactgagcatagtactaacagtttgtttttcaacctttgctgccccctctcccctccctctctcccatctatttttttttttagggttgccagatttttttttttttttttttttagactgagtctcactctgtcacccaggcttgagtgcagtggcacaatctcagctcactgcaacctctgcctcccaggttcaagtgattctcctgcctcagcctcccaagtagctgggattacagacacgtgccatcatgcccggctaatttctgtattttcagtagagacggggtttcaacatgttggacaggctagtcttgaactcctgacctcaggtgatccgcccgcctcagcctcccaaagtgctgggattatagatgtaagccaccacacccggccagttgccaggtttaacaaataaaaataaagaatgttcacttaatctgaaaagtggtgtgtgctgaaaaaattttaaaaataaagaatatttgctgcatattatatttattgaacaatcagcaaactaggaataaaaaataacttcctcatcaggtgtggtggctcacacctgtaatcccaacactttgggaggccgaggcaggtggattacctgaggtcaggagtttttgataccagcctgaccaacatggagaaaccccgtctctactaaaaatacaaagttagctgggggtggtgcatgcctgtaatcctagctccttgggaggcttaggcaggagaatcacttgaacccgggaggcggaggttgtggttagccgagattatgccattgcactccggcctgggcaacaagagcgaaactccgtctcaaaaaaataaataaataaaaataaaaaataacttcctcaacatgataaaaggtttataaaaaccccatagttaacatcatactcagccgggagtggtggctcatgcctgtaatcccaacactttgagagactgaagcaggagtattgcttgagcccaagagttcaagaccagccttggcaacatagaaagactccactctacaaaatataaaaatttagccagatgtcgtagtgtgcccacaggtggtcccagctacttggaaggctgaggcaggaggatcacttgaacctgggattttgaggctgcagtgagccataatcatcccactgcactccagcctgggcaacagagtgagaccctttttcttttcttttcttttcttttttttttgcctcagctacttggaaggctgaggcaaaagggatcacctgagtccaggaggtcgaggctgcggtgagccatgatagtgccactgcactcccagtatgggcaacagggtgagacagtctcaaaaagaaaaaaaaaaaaaaaaggtcagtattggtggctcacacctataatcccagcactctgggaggccaaggtgggcagatcacttgaggccaggagttcgagaccagcctgggcaacatggtgaaaccccatctctactaaaaatacaaaaaaaaattggccaggcatggtggcttatgcctgtaatctcagcactttgggatgccaaggtgggcagataacctgaggtcaggagtttgagaccagcctggccaatttggcgaaacactgtctctactaaaaatacaaaaaaaatcacccaggcgtagtggtgggtgcctataatcctagctactatggaggctgaggcaggagaatctcttgaacccgggaggtggaggttgcagtgagctgagatcgtgctactacactccagcctgggtgacagagtgagactccgtctcaaaaaaaaaaaaaaaaaaaaggtgccgggcttggtggcacactcctgtaatcccagctacttgggtggctgaggcacgagaatcgcttgtacctgggtggcagaagctgcagtgagcagagatcacgctactgcactccagcctgggcgacagagagaaactctgtctcaaaaaaaaaaaaaaaaaaaagaaaagtatgtgtatatacccaatggtaggtgaaagactggaaacattcccctaaaatccagaacaagacaaagatgcctactttcattgtttgtattcgatatcttattagaagttccaaccagagcaataaggcaagaaaaaagaaaaaaaaggaatccaaagtggaaaagaagatataaaactgtattcacagatgaaaagagcctatatataggaaattctgaaaaattcacacagcaacaaaaaaaattattagggctaacaaatgaatattaagcacaatagcaggttaatcatctgtcttttttttttttttttttttttttttgagacagagtctctggctctgttacccaggctggagtacagtggcatgatctcaactcaatgcaacctctctgcctcctaggctcaagtgattctcatgcttcagcctcctgagttgctaaggtgtgtgccaccacatctggctaatttttgcatttttagtagagacaggtttcaccatgttggcaaggctggtctcaaactcctggcctcaagtggtctgcccgcctcagcttcccagagtgctgggattacaggtgtgagccgccatgcctgattaatcatctgtatttctaaacactcacaattaacaactcataaaagaagttttaaaaacaattgcatctacaatagcataaaaaagaataaaataattaggaataaagttaacatcggggtacagtggctcacacctgtaatcccagcactttgggaggccgaggtgggtggatcacgaggtcaggagttcaagaccagcctggccaagatggcgaaaccctgtctctattaaaaatacaaaaaattagctgggcgtggtggcaggtgcctgtaatcccagctactcgggaggctgggcagagaactgcctgaacctgggaggcggagcttgcagtgagtcgagatcgcaccactgcactccagctgggtgacagagtgagactccgtctcaaaaaaacaaaaaaaaaattagccagttatggtggcatgcacctgtagtaccagctacttgggaggctgaggttagaggatcgcttgagcccaggatttgaggctgcagtgagctacgatcacatcattgcactccagcctgggtgacagagcgagaccctatatcaaacaaaacaaaacaaaaaactaagaaaatgtaagatttatacactgaaaactataaaacattcctgaattaaaaatctaaataaattaaaagatatataccatgattatggattagaaggcttaatactgtcaagatggcaaaattccccaaagcaaacgacagattcaatactgtccctatcaaaagcccaaaggcttttcttgcagaaatgggcaaactgatcctaaaattcatatggaagtgcaaggaccatgagtagccaaaacaatattgaaaaataacaaagttggaggactcatacttcccaattatgtggtattggcataagaatagatgaatggaatagaaatgaaaatccataaataaccccccacatgtatggtcaattgatttgacacagatgccaaaaccattcaatgcaggaagaatatcctcttcaacaaatgatgctgggacaactagatatccacatgcaaaagaatgaagttggactgttccctcatgctacatataaaaattaactcaatgtgatcaaagacctaaatataaagagctcaaactatgagaaaagacataggggtaaatctccctgaccttggacttggcaatggtttcttaaatatgataccaaaagcacaagcaactaaagaaaaaataataaattgggcttcaacaaaattaaaaacagaaagtgaagacaactcacagaatgggagaaactatttgcaaatcacatatattgtatctgttacctgtattatgttacttatatatatacaatctccttatgtttgtgctctaacataaccaaacctgaatcccaccagacttcctaatataacacatagcatgtttccttctcatctgagctacttgctatgaaaaccattctgcctaagcgtcagacttgggaaccattggcccaacaggtgcttgtgtaattctgttcttctaggtccaattttaagaagaaaaatatgagggtagggggagtttatgcaagacaagtagaaatgtgaaagagggagctaaaagaaaaatattaagttcaccaattctgaaatggctcttaaagcaaaaggaatcagcaactaaggacaaacaaccacatctaaacaagaataagaattttaattttagagcacgtgaaaagatgtgttggaggaaaaatcctgaaatataagtgaagctttgagagccttttttttttttgacagggtctcactctgtcagccaggtgggagtgcactgacacaatcacagctctctgcagtcttgaccttctaaactacggtgatcctcccacctcagcctcctaagtagctggactacaggtgtgcatcaccatgcccagctaattttttgtatttttagtagagatggggttttgccatgttgctggtctggaactcctgggttcaagagatcacccaaagtgctgggactacagacctgagtcaccacacttggcctttttttccttttttttttttttttgagttagggtcttgctctgtcatccaggctaaagcacagtggtgtcatctcagctcactgcagcctcaacctcccaggctcaacagatcctcccacccagcctcctgagtagctaggactgcgggggcacaccaccacgcctggctaattttatttttttgcagaggcaaggtctcactatgttggccaggctggtctcaaactcctggactcaagcaatcttcccactttggcctcctaaaggctgagataacaggcatgagccaccacatccagcatgagattcttattttaaaacaaggtataggccagccacagtggctcatgcctgtaatcccagcactttgggaggccaaggtgagtggatcatctgaggtcaggagtgtgagaccagcctgaacaacatggtgaaaccccatctcaaataaaaatgcaaaaattagctgggcgtggtggtgggcgcctgtaaccccagctactcaggtggctgaggcaggagaactgcctgaacctgggaggcagagcttgcagtgagccaagatcgcgccattgctctccaacctgggcaaccgagggagactccgtctcaaaaaaaaaaaaaaggccagacgcggtggctcacacctgtaatcccagcatttgggaggccaaggcaggcggatcaccggaagtcaggagttcaagaccagcctggtcaacatggagaaaccccgtttctgctaaaaagacaaaaattatccaggtgtagtgatacgcgcctgtagtctcagctactcgggaggatgaggcaggagaattgtttgaatctgggaggcggaggttgcagtgagctgagattgtgccactgcattccagcctgggtgacagagcgagactccatctcaaaaaacaaacaaaaaaactggctttaaaaaaaaaaaaaatctgtaagggtggggggagggtctccagaaaagaataaaatttttaaaaattggctttatataatgtctgactatacttttattctaaaaactctgtgacataaggctggtaaacagaaagaaaaatccaacaaggacttacttgaccgtaggacatattaagatgtttattatttactaagagtaacatgtatacatttgcagtaatttgtacaatccaactacattacaattcacagtaacatacactagctctaacctgccttggatacaattaagtctcctcaacacactattttatcgccaaacttacattctggcttttataatcattttgcaacacctggtacagtatacacctatagctttgccatagaaatgcccctaaatgcccttcagagagcagaggtgaatactttctcatgaagaaacgccaacttttctaagcgagttcgtttcagtagtgggagccattcccagtaggataactctaccacacggtagccaagccgagccagctgccgcctcttcatattgtgcagtccaaggagatccctggagccatagcaatactggttcctgtttgtgaactgaacagccagcttcattcttggggtctgcatgcaggctgcggggcacaggccagccatctccatggcccctgatttatctgctacattgcaaaggaagccccccagaggtacagctgccttattctccaactccatgggctgctgcccaggctctgactcagttttgccctggaaatgtcctcttgctttcccttttagtaacttattcatcaaatcatctgtaaggctgactcccacatgctcaagccttaatttggctacattttcagccggcgtggcttctctattaaatggtaatggcttcaggttaacatcaagctggacctctaagtcagaagatcgggtatgaggcaaaatcatatggtgcttgacgtactggggcccccccagcatggtctccagtaaaaagacagtttctaagaattcaggctttgaattcatatccttctctgctaaataccacagcaattcagacccctcttgctgaaggtgagtactaagacgattgcctctgtaatctggacactcaatgccaactgtaccatcgagggtatatagttccttaaggaggtcaaacttagttctctcctgagctaacctgacaaaccctggactgagagcgaaatcaattaactctactggaaagtactccaaaaatgccaggcccagcaggcaggtgggcaggtgttctgggtactggttgaattcaggcatctttctgtgaatctcacttatcaggctggagtaaaattcttctgcattgggtggcttataattcagagttccaaatgaccacagaatcttggcaacatctttacttcgacagtgtgccactctaggaggcaaagacgcagccactgcattcattactccttcattcaggaagcgtaaggccgagcagtaaagagtcaggtgcatgacaccttgaactcccagggaaggaattcgctgaggagctatctctccaatctgcttcatgaaattgatgtgatccacgtgagtgaaacggaacattttaacaatattcactaaggagcgactactcagatgctgaatgttagcacaagccaagtctccaattttccgcatgacaaattcagagagattagtacttgatttaaagaaccccaaacagatggtaccaacctcctccaaattgatcaaatctatatatttaaggatcaatgattccaatttttgcattaggtcctgggatacctgacgattttcacctataacataaattaagtgaactagctgagacaaggatagatccttccagtgcaaattaagataactagaaaaaatgtttaaaaacctaggtactttgcggcctaagtacctccagagatcagccaccaaaaggagctgatccatattcatctcccatacctgatggcaacacttggtctcatacacatctagcattgaatgggagtgagggattcctaaaatgacaaaagctttcaaaacattgatcagatcttgggtatcaaagagctgtatcttcttcacactcagctggcagagcagagcaaagctggtactgcccagcaagacaggatgctgctctgcaggcaaagagctcagcttacacaaataatcaacaatgacttgagcctggagattattttgattaactctgactttgtgcaaaattagttcaccttctgaaacagacaggagctgagaagtctcagatgcattatagctgtgaacacggtattctggtcttagctgtaggaaaactcgcatgttttcaaaggaatcaaacacttctacgtcctcttcatcaactcctgtggccctgggtgagcccagctgcaatgtactggccttagaggaagaagtcttgctgaattccaaacctgggtgggcactgctggttgtcaggattctccgagaagagaaggtgctacatatgttcttaacttttttggcagaatggcagaggctaatgtgttctggagggtcctgtcccccatgctgtgtgctgctcacattccagtatgacacacttcggactgcaccaaaggcagaaggactgcaaaatgctcggtatcttacaagttttaatgacttgagagtagctgccattctggtgtcagtattgatctctttggcagtcagaatacagtcctcacagatttgaccaggcaatttcttgtttatatggtgcttgattagagctggacggggaggtgttccacaaaaactgcctggaaatcttcagcatatcacaagagccagggatcacaaatgactgggtcagaattggtgccagatactgaaaaaagggtagatgaagaatgagtggcttctacctataaaagcatccaaatttacacattataaaaaacaggttgaaactacactgctgtctactcaaataagttcaatgctagtaaatgcccaaaccacatgacagcatatatcaaggataaattctgcggtctgtgtaaaggcctaggaaaacccccaacccagggtacccgtgggcagttcctggactgctgctcaccagacttccttcactgtacaaggcaagcagtgacggctaaagaagagacggtgctccgctaacatttgataggaagaaggaaggcagatttctagaaagaaggctgggaacaaaagtgagcaactccttccatctctttgatatcaaggcaaacaggtcctacctgaagaatgtttataaaaactgctatgctaacagcactaagtaaaaagtgggatctggtataaaagataattagttggctgggtgtgggtggctcatgcctgtaatgccagcactttgggaggccgaggcaggcagatcacttgaggtcaggagttcaagaccagcctggccaacaaggcgaaatcccgtctctattaaaaatacaaaaaattacccaggtgtggcagcacacacctgtaatcccagctactcaggaggctgaggcaggagaatcccttgaacccaggaggcagaggttgcggtgagccaagaccgtgccactgcactccagcctaggcgaaaaagtgagactccatctcaaaaaaaaaaaaaaaagatttaattagttatacctacgataaccctccctgttcttatagcgcaaaactgttaattccaaaattctgtcattctaatgctgttcttttactttttagaagatgcctactctcctcttcaggaagcttataacagaatttgagtcactattagagagtagtcacagagtaatggtgttattagaaagtatactaaaaaactcactcattttggtgggagaaagcagaaggttgagggtctgctcactgtcacttcacgggtgggaagcaaagagtaccccaaagctgggctcagggttcagggaacgccaattgacgcaactgccccgctgacatcttctggagaaggcagcttagcaatgtttccagtgagtctttattctgcctgtgagcagtataatgcccatttttctcccatggcagaaaccatgagagactatgaaattgattctgctgtgctctcgctttccttaatgcttattctttttctttccacttaagtgccaaagcctgacaagcaagacccaaggagacctgagttgtcaactgatgtaccagacagggctgttgctgcagaaaactccataaaagttccaagggtgccagaatgactttctgaaatgcctgcctaactctgctgtcagccactttcttccagagcccatagcacatcatcatttagttcatcaaagaacagcagggcaggtcagtggctctgttccagtagcccagctacacaggcttctctagatggcaggaacatatgtatgaatttctgtgtgaatcagagcagaattctctcacattaaatttttatacacttggttctttactgtggcttgtggaccattctttttttcttttttgagacagtctcactctgtcacccaggttggagtatagtggcatgataactgcagctttgacctcccacttcaagcaatcctcccacttcagcctcagcctcttgaagtagcaaaaactacaggtgcacaccaccaaacccagttagtgtgtgtttgtgtgtgtgtttgtgtgtgtgtgtgtgtggagatggagtctcacaatgttgccaaggctggtctcaaactcctgggctcaagtgatcctcctaccctggcctcctgaagtgctagtattacaggcatcagccaccatgcctgaccacctgtggaccattctgcccaccaaatttcaatctgtggttcagatcaagggtgagcagactatgtcctggggcccaaatctagctcttcacatgtttttgtaaacaaggttttttcagaacatagctaggccattcattatatattgtctatgtctgctttcctgctacaagagcagaactgtgtaactgtggcagattgtatggcctgcaaagcatatttagtgtttggtctattacataaaaagtctgctgatctctgctacacactatttctataaatgcagatagccagctttttaaaaattagaaaaacttggccacgcctataatcccaacactttgggaagctgaggcagaaggattgcttgaggccaggagtttgagaccagcctgaacaacacagcaagactgtctaaaaaataaaataaaataaaaaataaattaaaaaaataaaaaattttaattaaaattggaaaaactatagaaaaatagtactaaaataatgtttttctttaatatttagatgataattgaagattacagtcctcaaaatagtcattaggaaatccaattaatactacagcacaggaaaggtgggaacaaaagagacagcaggatggccaggcgtggtggctcatgcctgtaattccagcactttgagaggccaaggcaggcagatcacttgaggtcaggagttcgagaccagcctggccatcatggtgaaaccctatctctactacaaatacaaaaattagccaggtgtggtggcatgagcgtgtaatcccagccactcggggggctggggcacaagagtcgcttgaacccaggaggcggaggttgcagtgagccaagatggtgccactgcactgcagcctgggtgacagagactctgtctcaaaaaaaaaaaaaaaaaaaaaagaaccaaaaaaacagagatagcaggtaacagaactctccagctgacagaacagggcttttaagaagacctatttttggctgggcacagtgactcatgtctgtaatcccagcactttgggaggctgaggcgggtggatctatgaggtcaggcattcgagaccagcctggccaacatagtgaaactctgtctctactaaaaatacaaaaaattagccaggcgtggtggtgggcgcctgcaattgcagctggggcacctgcaatcccagctactcgggaggctgaggcgggagaatcacttgaacctgggaggcagaggttgcagtgagctgagatagcgccactgcactgcagcccgggcgatagtgcaagactctgtctcaaaaaaaaagaagaggaagacctactttcgaatttggaatttaatttaatccaccacaatgtgcaactaaagccatatactgttcaaatctgtagtcttcatctcatttgaggaaggagatcctggccaggcacagtggctcacacctataatcccagcacttcaggaggccaaggtgggcggaccacttgaggacaggagttcaagaccagcctagccaatatggggaaacgccatctctactaaaaatacaaaaattagctgggcgtggtagtgcgcctgtaatcccagctacttgagaggctgaggcaggagaattgcttgaatccaggaggcagaggttgcagtgagctgagatcatactactgcattgcagcctgggcgaaagagcaagactgtctcaaaaaaaaaaaaaagtagatcctaaaaaaatagatttaaaggtcccattttttaaataaaatagctgtgccatagtaaagcgaaaaacagaaaatgtctgtctagaaggaggctggtttacaagataaatgtgtggcaggcatcaacacatgaaaaagtacacactaatattgagtggaacaaatagcacataaacaagaattaacaaatatctctataaatgatattaattttaaaacattaaataattaaaattacttcaattaattctacctaagagtacttaatgaaattactatacgtggtctggaaataaaagaaccatctcctagaacatcaatgtttggtgcagctccagtgttttgaattcatgtgacactttttgatttgtaaaaacacaggctaagatccaagatggaaataaccagagctatgccttagggcctcctctgtgccaaggcttagagccttgtaaagctgctttatctgcattagttcccatccttataacatctctgtaatgtaagtttataatccccatattactgatgagaaagagaccacaagattaagaaacctgccaaaagttacacagccaagggattgagtggagcctaatattaaagactgtctgactcttcagcccacattattggtgtactagagagacaagaatggatgtcagaaaacaggttcggggggcagtacggggtgggatggctgaacaatctatggtcttctaggatttccaggtgccagggagctggagggttagaactaggtaagcttgaaagtcccttccacctctaacagtctacgattctatcactacggtttatactgcaagttgagtatcccttgtccaaaatgcttgagaccagaagtgtttcagattttaaactttttcagtttttggactatgtgctttatactgaccagtgagcattccaaattcaaaaatccaaaatctgaaatactccaatcatttttttttcctttgagtatcatgttggtgctcaaaaagtttcagattttggagcattttgcattttggagtttcaggtttggaatgctcaacctgtactttaaaaaagaacaaagagaagacctcaaaggctgaaatctacatgaggcaaagagttcgcaggatgctccaggatcaaagtaaggagagctaccacaattgaagacctgaaagttggcagtagagatatgggatccagaaactagggttcaatacagagaagcaaagggaaatcccaggaaaaaggtgaaggaagatcccaggacaagagctgtgaacagacataaagagcaaccagctcatgctggacgacatagacagtacccaggagaggagaatcatacttctaccggataatccgggcatgaacaagagataaggatacaaaaagccatgctaataaaaacagtaacaaaaattattaatgccagggaagacaaaaaagttatacaagatagaatatgttaccacaggcaggatgcaatggcccattcctgtaatcatagtactctgggaggccaaagtgagaagatcacttgaggccgggagtttgagaccagcctgggcaatgtagtgagacccccacctctacaaaatatttagaaattagccaagcctggtggcacacacctgtggtcctagctactcaggaggtagaagtgggaaggttgcttgagcccaaaaagttaaggctgcagtgagctgtgatcctgctatggcagggtgacagagagagaccctatctcaaaaaataaataaataaataaaaagagtaaagaaaatattagtatatcatactccctattcagttgagaataatactaacataattttattaatataaatcttgatattagcctaaccaaaaattatgagcaaactatattgggaggataaagtgagtaagaggaggagtagggggaggttgatgatacaagagacctagagcctcaaagtccataataaagaagtacaattggacaggtgtggtggctcacaactgtaatcccaatattttgggaggctgaggcaggaggatcacttgaacccaggaggcagaggttgcagtgaaccaagatcgtgccactgcactccagcctgggcgacagagcaagacacagtctcaaaaaaaaaaaaaaaaaaaagaaaagaaaagaaaagaaaaaataaatatagtgatggccaggatcagtgagtggctcacacctgtaatcccagcactttgggaagctgaggtgggcggattgctttaggccaggagttctagaccagcctgggtaacatggtgaaaccctgtctctactaaaaatacaaaaagtaggctgggcacagcggctcaagtctgtaatcccagcactttggaaggctgaggcaggaggatcacctgaggtcaggagtttgagaccagcctggccaacgtggcgaaaccacgtctctcctaaaaatacaaaaaattagccaggcatggtggcaggcacctgtaatctcagctactcagaaggccgaggcaggagaatcacttgaacccgcgaggcagaggttgtggtgaggcgaggtcgcaccactgcactccagtctgggcaacagagcgaaactccatctcaaaaaaaaaaagtgggtcgggagaggaaactattatttagtgttacaagctctactgaactatttgactgtttaaaccatgtacatgtacaattttgacaaaaattaaattaaaaaatccatgtattatgaagatattatggtattgttcaagataatgaatggagaaagtagcttaatagataaggaaaatgttgaaaagttatttttagtgcaagcactttctactacctaagaacttctttaaagatgttcaataacagaaatgataacaaaataaggaatcttagaggcatgaagagccaacctacaaatggtaaacagtggctacttactcttttcactatgcaacatttacagtaactctatagaaactgtatctacatacacaggtctgaaacagaggacttcagaagttggtcttgagtactgtggagaaggaaagaaaaacaaggaagatacagaagcagcagagaagaacagtagggagaaaagacactgcaaagaagcagcagtcaggatgaccagatagcgaaaacatacctgagaaggttagttcctccttactcaaagactctcagaaaatccataggaaagctggaaagagaacactatgagatgctcagtcaattaacttctgactcttttttttttttttttttttgagacagagtcttgctctgttgcccaggctggagtgcagtggcgtgatctcagctcactgcaacctctgcatcccgggtttaagtaattctcctgcctcagcctcccaagtagctgagactaaaggctcacgccaacatgcccacctaatttttttgtattttttggtagagacggggttttgccatgttggtcaggctggtctcaaactcctggcctcaagtgatccacctgccttggcctcccaaagtactgagtacaggcaggagccaccacgcccggcctgactctttcaataaaggtcaaagatacctgatatgatttcacaaaactcctttcctagtttaagtgccccaagtatacctttctcccctttaggggtcctaacgaaacagagtagagcctcagacactcctggaccctgtcagttccaaaaggcaatgcccaaacctccctgaatgatgtgatttcacaggactgaagaatcttacctttctcccttccacataccggtctgagcagagccgaatagcttcattttaaactagagtctagaagttagaggaggggggccaggcagaggaaggagcgatgctaactgtagactgagtataagacaccttaaacacatacaatttaccacttaccagatctgatccctcaattctaacacttttcctttctatgtcccaataaaattgccacaaataaatgaacactccaaccctattcttgtctcagcaaataatttgttgagcaaccttaagaattaaaaaggcaaaaaaactggctagacaggtggctcatgaccataatcccagcactttggaaggccgagcaggcagatcacgtgaggccaggagttcaagaccagtctgggctacatggcgagaccctgtctctaccaaaaaaaaagggcaaaaaaaccgaactttctctaggtgctgaggtattctgctgagaatctacaaaacttcaaagcccctagtgagggcttagagactggcagtaaggaccttagctgttaatgtggatgttaactgggctagactcttctgtgtttctgtttccacacgggagcagggcctcagagaggagtctaccagtactgcgaaggtgaagcactagtgcaaaggtgtttaggtcaagttcagtgtcactcgcaggtctaagccaaactaaaattattcagtctagcaatccatcccttcctttttgttctagactccatgctgataggagaaaaacagcacatcacaaacatttgtgaaactttttcagctacacagcccttccgcttctcttttaagactctgctattcctctatcagaatggcaagaaggatgtgggtagatatagtatgactaagccctgtagatgattctgttagagctactgcttttaaagggtttcataaaaccctgtctttagaaaacctctccatataacaacaggcagtaggcactcatgtcctctcagcccatctaaatggggcttctagaggaattacaaaatccaggcaggtaaagagaagtagctgcatgcacacagtcgtcataagagaaaattcccaaataaatggtccaagtacctataactgttagctcaataaacacttggttttatctgcttttacaatttgcaaggctgtatagaggctgtatagtacatacttcagacaaataaagaaggagtttcagaattcttttgttttttttttcagacagggtctcgctctgttgttcagtctggagggcagtggtgcaatctccgctcactgcatcctcgaccactgccccccacctctcaccccggcaacctcccgggcgaggatcgctcaaggatctcaaacgatcctcccacctcagcctcctaagtagcttggactacaagcccaccaccacgcctggctacattttgtttttttgtgtgttttttttgttttttgtttttttcgtagagacagagtttccctatgttgcccccaggttggtctcgaactcctgggctcaagtaatccttccacttcggcctcccaaagtgctgggattacaggcatgagccaccgcacctgaccttagaattattttatatcaaagttgacttattcacatgatgaatggcaaggccttattagggactaaaaaaataaaccaatggatggggaagaaaatcatactgactaataaacattagacctgcataactgccaaaggcctcactttttaagttatgttatgcagcacagagtcttcagattttatttacttatttatttatttatttattcatttatttgagacggactctcgctctctcgcccaggctggagtgcagtggcgcgatctcggctcactgcacactccgcctcccggggttcacgccacgctcctgcctcagcctccagagtagctgggactacaggcgcccgccaccacgcccagctatttttttgtatttttagtagagacggggtttcaccatattagccaagatggtctcgatctcctgacctcgtgatccgcccgccttgacctcccaaagtgctgggattacaggcgtgagccactgtgtccggcccagattttattttagtctaccaggtagtagcaaactatccaaggacttgcccaggaccattcaggtcagtgagctacagaatctagttctggaaaggcagccattcttactattcacaaagtgtagaaaacgtgaattcagattccagcagcaacaaatgactggagcacaaaacgccagccacagttggtgctaacgcagctggctatcagctccacaggatgaagcactgtccaagggtctgatcagtgaagcatcacccaagactgatgaacacagctgatatgaggggacccaaagttccctgagtcaagacagaagagctgtgtcacggtttgcacagaaagagaaagagcaactattcttacccacggaaagaaaaagggagaaggccatcaatactacccttaggcttgtgcaacgagaaactgctaaaaatggggggaaggtatatatcctatcatactgatgtttaccgaagactccgcatcccaaatgctaagcaacatactgtagggccttgctactcagtgtgtggtctgcgtgccagaggcttcagcctcgtctggaatctagttaggaacacagttatctcagaacccaccccagtcctacagaatcagaatctctaagcgattcgcaggcacatcaaagtgtgatgagaggcgcggcagaatatctgactacattctcttaacagcaccgtgagacaagtactgttacgatctccatttcacagaggaaaaaaaatcaagggtcagataagccccctgccaaagatcacaaactcaggagcggcgagagtcactgaagttctcaccacagccaggcctgcgagaggcactggcaacccaggccaagagctgaacaaggcctcgatgcgctccagctctgggccggccgggaggacaggaggcacaggccaaggcccaggacggtcgtgaacgcggaaagaggccgccgcgacctcctccccggccgccgccactcacctgatcctcccgaaggtgggcgccgcaacaccaaaccggggacgccgcgggcggcggcgacacagatactggctcctccggcgactccgagcctcacagccccacttccggccaactgcccgctacttccgcctgctgcgcgagtgacggatgcggccgaggctcaaaagactctgtcagcgtttcccaaggacattttccactggaggacgttgttgaggaggcagggggagtctaggacctgcagagggaaaacaccttcctggatggatcgctctggaagtcattaagcagcttagtcccggcgcggtggctcacgcctgtaatcccagtactttgggaggccaaggcgggcggatcacctgagttcaggagttcgagaccagcctggctaacgtggtgaaacccccgtctctactaaaaatacaaaaattagccgggcgtggtggcgcacgcctataatccagctattcaggaagcggaagcaggagagtcgcttgaacccgggaggcggaggttgcagtgagccgatatctcgccactgtactccagtctgggcacccctgtactccagctctgggacacagagcgagactccatctaaaaaaaaaaaaaaaaaaaaaaaagtaagtagcttagacacatgttcaaatctgaggaccaccactcagggttttatggccttggagaagtcacataaattcattcttgttatattattattattattttcatagagacggggatggcagtgtcttcctatgttgcccaggctagtctcgaactcctgggctcatgcaatactgccgcctcagcctccgaaagtactgggattacaggtatgagccatcgcacccggcccacataaattctctaagcctgtacagtgagaaaaacaatacattttttttttttttgagacaaagtcttgccccattgcccaggctggggtgcaatggtgcaatcatggctcactgcagcctcaacctcctgggttcaagtgatcctcctgcctcagcctcctgagtagctaagaccacaggcatgcaccaccacacctgtctaattttaacaatgcattggtcgggtgtggtggctcacacctgtaatccccggtgttggagaccggcctggccaacatggtgaaacctcgtctctactaaaaatacaaaaaaaaattagcggggcatggtggcgtgcacctgtaaccccagctacttgggaggctaaggcaggagaatcacttgaacgcaggaggtagaggttgcagtgagccgagattgcaccactgcactccagccggggcaacagtgagactccatctttttttttttttaatgcatttataatagagatgtatctgtaaagtgctctcaggaaaagagctagtgacatgatggatagatgagcctgctgagagaaatggatgtggagctggggcttagcgaggccagagctatggagcatgagccagggtgattctccaccaccctaagaaggagggctgggtcctactgggtacatatattgacacagctgtcagtataggtacctagacaagaaagagactctactaaacctctacctatcagaaagtcctggccccaggctgccattcctgagggcacttgagatctgctgatcagggtcttcatatcttgtcaatgccttggctctaaggggtgtgaaggagagctgagaaatcatgctccctccagggcctatcttgtagggaagacaaaatcaatgtaggaagaacacgtccctgccaggaggggcaagcctgacatcccaactcctgagctctggagacagcgctgtttgaatatctggagccccagaccacagacaccactgcttagggagggttctctccctcaggccagaccagggcaaacactattcattgttatgactctgtccttgccagtagaacccagagaaagcagagagcctgcccccaaggaatgaaccatgtttgttcctaggcagccatgacaatcctgtttctctttgtaatactcaaattcccattctcccttgaagtgggaggagcatgtggctcagttctggccaacaggacttaaagggaagggtcctgggagggctctgggaaagcttttacttttcatgataaagtagggccgcctcaatgtcttcatggagctgtggcagccactttgtggtaaggagggaacaacatgccaaggatggaacagtgggaggatgaaaatctaggtccccgaggatccaacaaccatgacaccacctccggatttcttgtcaggttggggaaaaataaaccactctttgaggtcctttgattacttacagcagagtgcattcttgattgtgtgctttgagaggatgacagaggaactgttgtaaagggaagctctctgctgtgcagcacgcttgggtcccttttgcctttggggcttcgccattaattgcaaacctgttcccagtcttcacttctatccattcagcccgcaaacatctaccagttgctgtaaggtggcttaggcgactgcaggctgcatctagctgtcctgcgtcacctgttttctggctagcagcttagtgtccagattctgagctggagccagcttttaacccctttggcaacagtctgagctgaagagaaagccccactgggcatatacatggcaccacgactcttcccgggcaacgtggcagaacttgggctttgggccaacctcctagcacggcccagtgagcacctccagtctcatgcctcctctgggaaatctgtttactccagctttgcccccatcccccacccgggcctcacctcccgcacctgcaaagacacaagcaggccaaagaataccactcaagaggctttttccgttttatttctttgggaaaggaaaacaaaaagtctttccatcacatatggtagagatatatatttatatatatttatatataatttcttttgtggttggacgtcccaaagctgagtctgttcatatttttttctatttttttcttactaatgccttctcttctccctgcccctgtggcctaggcccaggttctagggcaggtacagtgaggggtgaatggaatgggcagtggtcgccaggatggcctcccacccagctcagagacctggtgaggaccacccagaagggctgtgcagagggttagaggccacacagaggggcactcatgtttttgtgggggatgcacagctcattaaacagtcaccagtcatgggaggaggctggtcaggggctaggggacttgctcacagtagttgccagctctctccaccttgccccccaaaactcagtcttgggggtgggaggaagagagtgaaaaagagagagatataagggctgagggccaagcctcctccaatttttattgctggtgaattagaaatttgcttttcccttcctgtcttggggagatagactctgagagggccccaagagaagcagctgacattggctgacctaacccctcatgccaggcctaccctgggcaggtgctgagccacctcagggcgccaggaacctctcaggtcagccttgttcttcaagggcaatcacatccaactctccccccgcccccaaaacaagggcctccggctcagacttgggccagtggagctgggaagtgggcagtgcaccaaaggtcaagcggaattttctattggaagaaaaggtgagactttggggaagagactgcctaggaagatgatgtgctgagcatgaaagcagaaagaggctgggggaatagagtgcgggaagacatcgcagacactcgtctgacctcagaaactgggcgaggagagtgcctgagaggcaggtagcacttaatagctgtgttagagccggacagtggtcctgggtgtggggtcagccaagcagatggggctgttgccctgcgggatcctggccagaagggtgagggtagagccgagaagccgtcaggcaacgcttcccaagaacaggaggacagatcttccctgggtgctggacttccagccccagtcctcccctcccgcaacacacacacagggacacacactcacaaccaggccaggctctgaggcctgagtccaagagatcttgttgggggaggggctgggcaggtagccctctcagccaaaggcaggccatctgctcccacttgtcctgccaatctgcccagggagggagagcactgtaggagggagagaggtctggagcccaggctctgtcagtttcagcaaacctggtgcaggccccctcaggctccatggcctaggaggtgagcacagagagcatcactagacacagggtggccaacagtagcagcccaggcctccagaaggactggggcaccttatggcactgcacgtctgctgcctccatctccaacaagggggtgccgagaaagggagcatgactcccccaccacctaggattgcccccactcaccctgccctcctcctattccctccttttaggggggtccaagtgggctgccacgggggcagtgctggagctaggagggcaggtggggagggaggaacctggtcacagctgcttagagaacctctttggtctggggttatggggtctatggggaagagagatggaggggaggggacactggggactctggccttttgacaggacatgtgtcaaaatgccgagtgcccaggtcgatcagatttctgtggactcaatgcgctcgaggcgggagggggtccaggccttcttctcctcgccatgctggggagtgggcgtgcttgcaccccctgcggccccgcgctcccgcagcctgcgctccagctgctggttgcgctggtacatctccacgtagctcagctgcagctgcttctggtactcgatcaccttctccttctcctccagccacacgcggcgctcctcggcgaagctggcaccctggcgctcccgggcccgccgctcagccgccagctcggcctgcagccgccccacctcccgccgcagggcccgcgtcccgctctccccgccagcctccgcctccccgtccacggaaaccaaggaggcggcagcggccaccccggcctgacggcgcatcttagcctcgtcgctctcgcaggtggccagagcatcctgtggctcggccgggtccacgggggtcagcgccggcttgaggcaggcggcaggcagctcgccttcgcccagctccaggctggcctgcttgctgctgaaggagtcccgcaggctgagcagctgctcctccttctcccgcagcgaagcccggccctcccgcagctgcgagcgcagtcccacgatctcactcaacttctgcgacacatccgcctgcgagtccttcagctgctgcttcaggagggagatctcgccagccttctggcacacctgggcaggaacaggtgagaggagaagccaggtaaaggcagagctctgctcaccccaacccagctaccagatctggagccaggggcaccaagcttcccggggctgcaggctcagcccctcatcagcagcgacgcacccgattccctgcctggactcaagatggacatgtctcacccagcggatggcctcgggtcctcacagacactcccaattgatttttgtcccccctgctcctttcatccccccccccatcccaccgttatgatagtgaggggcaactgctctggggtttcccagagggacagaagggaggcagaggggaggcccagatccccagcccgcacctcccacttagtttcctctatccggggcaggaagtcggcctgctccttctggcaggcggccaccttgtcctccagctcttcccgctgccgcatcagccgggccgcctcctcctgcagctgcttcttgtcctgctgcagccgcaacacctgcagctgtaggccctgctgggcgcgctgggcacgtcgggccacctgctgtagcttcccgctgcagccctgccgcagctcggccagctcccgctcccacgccttctgccgctcctccagtacctgggccacagccgcctcgctctgctccaggctgcgccgcagagctgccacctcctgctccttctcccacagccgctcctccagctcctggatgagtgcactgggggagggcggtgagcaggccgcgaaaggcaggcctccacctccgccctccccagagcccaggtggcctggccgccccatagatgacgacgacccactcttgctggaggcccgtccactatcggaggtccccaggtcctggtagcccgaccccccaccgctgctgccgccactaccactaccatagctggcagtgccaatgcggttaatgtggctggtggaggcactgaggggtgccaggtgctggctgtagctggagctgtaggtgggcaggcttgtgagggagttccggcctgagtctgagaggccactcccactcccacccgctggagtcatggtccgagacttgtccagtccgcctttgaggccaccagggccctgccgtccctcaggagtcccattggtctgcggggggcacaaattctgcatggagtggaaattcttgggtacgacaggcttgaaggccgacggccgaactagtggttctgagcactgcaggaaacgcaggagggggctgggggtcaggatgaggccttgggcttggcccaggctcttccctctggccaagacttgtccagccccacctcccacccctactggatttccaccctgaggttccccatccggggttctacctcatggctccctgataccagatctctgtccttgatctacccgctagacttggccccaggtccccagtccatgactccccagcccagcctccatcctgcccccacaacccaacctccaagaaggcccactttgccttcctctctgggttgcctcccacccccagaaaaaggctgtgagggtctcaggccctgcggactgacctggtctagcttgccagaggtggccaggagcttgggtgggtggctgggctcacgatactgcggtggggctttgtcactgccaccactgctgctgctgcctccgctgctgccaaccacgttgccacagacatcggtgtggtcactgccccgcagctcaccattgaggtagagggagttggcgagacccttgtcctctgaggggtagcggcccggcctctccctgctggccccactgccactgcctcgggggccagggaaactgccctggctgcccccaccccctgtgcgggtacccacgctcttcatggcaaactcctgggcatgggccaccccactgcccacgctgcccatggccaggcgggggtccgggggtccaagctcggagggccgtggggcaaaggccaggagaggatcccgccctgggtcagcgcgcacaggcagcgtctccagcttcgccatgactaagccaggggggcactgtgggcacaggtgggaaggcagagataggtaagaccctactcctattcccaccaccccagccaagtcaacccggcaccgctctgcccctcagtgtccccttccctacaatgggtacaaaaagttcccaggcatccaaggtgaaggaataaggctgggataaaagagagaacttgggaatgggggctgcctgttgcccacctgataaagcccaacccccagggctccatgcacatagcccccagcgttgctcagctcagctcagctcagctcagctcagcgttccattcctaaacttctgccttagccccacctccgccatgagcttcccaggctcagtgaccctctcaactctttgctgcaaccccagaattttggggttctttatcttgggtctgggaccctaatatcccaacctcatgggctggggaaatggggttggaaggggagagcagtacctgaatccaacagggaaccaacctcagaaattaggggagggagagaaatacacccctatccaaaaattgagggtgggggtccttcccagccccctaacctaagtgttgcagtcagggcagaagtggaagctcactaccagcgcaggcttctctccttgcctttccaaggggttgaggggccgacgggtcctcaagcctgggaccctccgaggcccggtctgcaggggccatgtgcctcactctcgcagtcggggctcggcccgaaccagctgcgcgactttggaggggccgactgagccatcccggactgcagttttctcctctgcgaaatgggaggaatgaaggacctaccttgcggggctgccgcgtgccaggcgccccgaggcggcgagcgcctgaggaaacgggggtctgggggagggtgggtaggcgacgcacatctgggtcgcgggtgggcgccgccaagggcacagcctgtccctcccggatggacgggggccgcggctgcagtaggtggcaggcctgccctccccaaggtcttcccagctcggccgcaccggggccctgggaagacagggcccccttcccgggatcagtcctccgcagaggtcccagggctggctgaggccggggcaggggacgcagtggcgccagctgctggcactgacggagcctctctcagggcctgcgtttcccacaggtgggaggggggaggggaggggaggggccgctgcagggtgcgcggccccaaggatcctgcgcctgccgaaccccgcaaagaattcactgccaccaggaagacttcccggattactaccctctcccgctccctgtggaccttgaccctgctcagcttaccgtgaagccctctgagtccttctgtgggtgcgcgtccccctcccccaaggccggcccacaagcgcagggggagccaggcctcgggttacctgtgctcagggaggccgtgcttcctcgttcctttgtctcaagttcgcacctgggaacacctgccccagagatctgcataatgcagccgggcaggagcaccaggcagtgtctgcctcgggttagaccctcaaataagtgtgtgggaaatgggagagggcgcccttcaggccttttcccactacaccctgcataaaccaggcagggagccctccttccctatcaagttaaggggcccacgtggcaccctatggccccacagaccgtcttctacccagatgcccagttctaatgctgagtccctggcccagaccaagggcacctgacaaaactgttgtccttcgggagtcttctggcccccacaccaggaatgagagctctaggttgttggaaagttcactaccaagcctgtccactgtctctgtagaattccattctcagcatctgtccccacaggtgtggagaagagcacttcgccaccctcctcccttggacccgtctgtccccataagcaagggccaggactaggatgaggacagagagccacgtagggcacaaatgaagggcacaaacagcaagtacacagccctgagggtgacagcctccttccctttgtgccttgggtccctctctggcctcactctagtccctgctctgcctctactccccagcatactccagccccctatgcctcagccctgcaaccccctcctaccttaagtatggacccttctcttgccacctctgggtgcaatgtggggagcagctggggactgggaggatgaagcctgaaaggcctgaggcttggaaccagtaggaaggcctgggcagggtttgggaaagaactggcaaaatttcatacagatgaggtcaggtggtggggacaagggataatgctggactgggcaccagcgtgcgtgtgacactgttaacatgatagggggagactgcttggggaaaatagttgctttgggaaacaccagaggaagatacctctcaagcactaaatggaggccaagcaaggtggctcatgcctgtaatcccagcactttgggaggtcaaggtgggcagattacttgaggccaagagttcaagaccatcctggccaaattggtggaaccccatctctactaaaaatacaaaaattagctgggtgcggtatgcattcctgtaatcccagctacttgggaggctgaggcacgagaacccccttgaacccaggaggcagaggttgcagtgagctgtaattgcaccactgcactccagcctgggtgacagagcgagactctttccttaaaaaaaaaaaaaaaaaaaaaaaaagcactagatggagagagattgagatcatcagttttcaagggtgctgggggtgtaggccagcactgagccagggagcaaagccccagaagtctggaaggcactctgggagcaggaagaaggccaggagaaggtgggccctgaaggccaagattggggggattcaagaatgtggggacagtttccagtgttaaaaataacagggccaggtaacactggggttggagagtgtgctgcggatttaggagctggtctcgagacatcaccaatgtctatgtcagaatggtttcagaaaagtggtacaagtgccggatgcggtggctcacacctgtaatgccagcactttgggaggccaaggcaggcaaatcacttgaggtcaggagttcgagaccagcctggccaacgtggtgaaaccccgtctctactaaaaatacaaaaaattagctgggcgtggtggtgcgcgcctgtaatcccctactcaggaggctgaggtgggagaatcactggaacccgggaggcagaagttgcagtaagccgagatcatgccactgcactccagcctggaagacagagcgagactacatcaaaaaaaaaaaaaaaaaaaacaggttggcgcggtggcttacgcttgtaatcctagcacttagggaggtccaagacaggtggatcccctaagatcaggagttcgagaccagcctgaccaacagggcgaaaccctgcctctactaaaaatacaaaaaaattagctgggtgtggtggtgcatgcctgtaatcccagctactcaggaggctgaggcgggagaatggcttgaacccaggaggtggaggttgcagtgagccaagatcgcaccactgcactccagcataggtgacagagcaagactccctctcaaacaaataaacaaaacagaacaaaaaaagtggtacaaaacaaaggcagtccacaaggctagaggagtgcagagaaagacatggcagagttcctgctaaaagagaagacagttatttaaggaggtttgagattcaagggcttttttaattttaaaattaaccatggtagaaacctgtgtgttaatatgctgagggaagttgccaatagtgagatgaaagatctaggcaaggggatagcaaggtgactgcaccagatacctggatctgggcaggaataaacctcaacagtgatcatgttgaccttgagtgacagggtataatgtttgggaaggtgctttgtaaactataaggggcaatacaaacatgtagtacaccttctctgagatccgggaaaggacaacctgagcataggttggggctggtcataggccactctcccctactgtttctctagagtgtgtgtagtccctagcaagtctcagatgcctcgagtcgtggatggaaacaaggtcccaggaccattgtcctgagcctcctttctccgtgctctacctggggaatgcttgactatcaacccacagaagctctctctggagcctcactgcctaaagagcttcttgtcgtaattgtaacctgtcatggttaaccccttgcaagcatgccctgccccttgtctctcccaagctttggctgctgcagcttctttccacaaaatcccagcagatagccgggcgtcgtggtgcgtgtctgtaatcccagctactcgggaggctgaggcatgagaatcgcttgaacccaggaggtggaggttgcagtgatattgcgccactgcactccagcagcctgggcaacggagtgagataccccctcaaaaaaaaaaaaaaaaaaatcccagcaggacaccggcaggacaaggaaggggatgtttccctggtaagcaggaactgaactgagaggaaaggtcacggtcctgaactagtccaggtaactgagcatggtctgcaaaggcagcctcctggcatcagtgcaccaccctgagatgacagcctgttgcctgactgcctcgatctctgtcacctcagccctcagtgcctggggcattatacacagtattagcgtcatgagggggccaaacggactctacctgacagttacatgtacaggtacctccaacccacccctcaacctgtgtctctcccaaagctaggaacacttggggtctcagaggccccaaccccagcccattctatctcctaaaaatctctagccagcccctccatccagcacccctgctgggggctcctcaatggactttcttctcctgcactccctcccccaggcagctgccaggggattccttctaaagggcaaagctgatcttgcccctgctctgtccaaatccttccatgagcaagaccaagtgcagtagacagagttctggcagcatcagctccaagtgtaaatcccagcttgactgattaggggtgcaacctcatgcaggttatttcacctcgggttctcacacctacattgcaggcattttaagaagtaaatgtatgatgggtgaaatgcctggtattcctcttggtccccagaaccagagcagagcttgcagcagggtccccaaggactctcctgatgcccctcctctatctaccctgacctgagcccctctctacttcacacacaagctcttgccagctctctgtgcccatcctacatgcttctagaccagttcaaaggctggcctcaggacagcatccctgatctccaccccccagagggggcatcttggagcacttggctgaggacaccccagggagatttcactctgaggcctccccagggctggcctataggtttcccaggagcacagagggcagagtcctgggggtctctgggccctgcaccaaggaaatgcagggcaaatgcctgtgggaatgctagttatgggcaatgcaaagaggcagtgaatccgggcagggagagcaggaggggtttccaggaagcaggactgagggaggaaagggatctgggggcactgcagggcttttggggtgcagagatatccagaacttcttggttgggatgagtgaggggagatccgtcttccctcggtggcctaagcactggcagcggaatgggcccatcacctagctactggctctgatgaagccagtgtttcaggactgagggggccgagagcgccccctccaccccgagcacacacacgcgcgcacacacgagcttctgctgggggtgggagggggggtcgccattcaccagcagcccacggcccgcagagccaactgatagagaccccagccacaggccacaggacctgggagtccctgcgatgggggaaaccccgcccgcacctccccaggctccccaccaacgcgtgtggccccggggggcggggcgcagagggaagaggtgacataatccgagccgcaccccctctggccgccacctccccccaggccgggcgaagcatccatgacatcatccgcctcctctccgctcccctcccccttgggaccctagcagcgggacgcgccccctacccagtccgggtcaggtcagacatgccgcgcagtgcagcaggcacggcggcaggtcggagccgggagggatgccacgatgggcctgcctcacttactcgctgcctcagggtccggcgcggggtctccgacacgggcgccaccggccccgcttgctggcgcagcccgaagcacgcccggcggggcgcgctgcgcgggcccggctccgctccgcgcccctcctgctccccgcccgagccccgcccaccagcggctgcggcaaacgcgagcccgccctccggccacgccccccagggcagccaatgcccgggctggggcggggtgaggcgccttaaccccttcgtcgctgcgccccgcccgcgcgtgggacccctcagcctcaccctctctagggcgcagcaagtccgccgcgagcccctctgctcatcgctcgttaccccccaggcccttgggcttgggctcaggcccagtcgttcctctgcaacaaatccaatggaaccgcgccctccctgaatcccacgtctaggaagaggaggaggagcccctcttgcttgggggaaggggctcccgactcggagccccgagccccattcctctcccgcgccagctcttcgggacgcggcctcccagcggacgccctgagaccttgcaagtccgctagggaggggtcgggacgagccgtcgcgggtggatccgcccggccgagcaacgacccgcccgggcgcgaggaccacgggctgtcgtgcgggaggcgtcgaggggcagtaaactccgttcgtgaccaaacggagacgatttgaaacttgctgctcacactggatcaccgtctggaaggtgcgacggggaaaaaatacacattacactccagcaggattgaacgctttcaccctgtgccccgcgcctggcgtaacgcgtggccccagaccacacgctgtaacccggggtgagagggagtgaggtgggacttcgtaccggacccggagcgccggcctcgcccgcgcgggcagcgttcactgtggggagtgctcactcagcctagggcggcccgggaggactgccgggaggagggagtcggccttgaattgaggcctcagccttgaatagggtagggaggcaagcctagccgagagtttagcactagcaaaagcctggaggcaccagggtctgccctaagaactgcagcgcctctgctctggctgggatttaacgcattacgtctctgctgtttataggtgttgtgtttggtcttacgacttcgtattctatagtttttatttattcctgttttctgaattttcccacatttgcttttatcttctatcgtgattttcaaggcagaaagtatttttaattcttctcgcggctgcctttagatttatcaaatgaaaatagtttacatttcacacattagtaaagtcagtgacaaataattcgtttttatattcccccatgagaaattttgtgtgcttttctgcctcctacctgccgccctcactacttatatttgtccacttaatcaggacgacagacctaacttttgtttacactttttttttaagccacaacattctttttcaatccttgtttttggcttttgccaactctgtttaattggtttcaatgttactgccggttttttgtgctctaatttttctattcctcatttggacccatctctcacatgactggtgatttcagggaggactctggaatgttgtatttcctaagcctttgccttaggtgagaatgcctttataatgatttcctgtttataggattcttgagtctcaagctttccccctcaaaactcttgtctttatttcattgtcttctggcactgaaaatgcaaagctgggtttgtctgtttaaggtcagcagtttgcttggtgcttgcaagggtttttctttaccctcaaaagtcaaacattttgccagtataaatcaatatgggccttatctattaattttccagaaacaaaagaggtcttctttgtagcttagaaaagttttcttcctgtccattctgtgaaaagatttgggtttttttctttcctctcctctaaaactatcacattggatcaccaatgtcaaataaatctgtttgttttctctgcaccctgggagactatatcaagtttttcttcaccattacggatttaattttcttcagagccaagagtactgtttattttctccaataagacatttgattctgcttgttttatttttctttcagccaatttccattccacctctgtcttgatctcaacttaatctctctttgtagtctccattcctatttcatagactaatgtggttttgcatctttaaaagaacaccaggaaaataagagaatactatctatatctgactctggtccaatgcatatgaaaacttttttgtttttttgagacagagtctcacttaaaatttacacaaactctagcatagtgtgtaactattgaatgaataactaatgcaatccccttcctttctttcagagcaactatgaactagactttttttttttttttttttttttttttttctgaaatggagtctccctctggaatgcaatggtgcaatctcagcccactgcaacgttcgcctcctgggttcaagcaattctcctgcctcagcctcctgagtagctgggattacaggcatgtgccaccaccacgccgggctaatttttgtatttttagtagagacggggtttcattatgttggtcaggctggtctcgaactcctgaccttgagatccgcccgcctcggcctcccaaagtgctgagattagactatttgtatctaggttcatcagttcagtgaactaatcaatactttgttttgttttgttttgttgttgcttaagatgatttgtcacctgctgattaatgatcacacaagttgtttttttttgagagagtcttgctctgtcacccaggctggagtgcagtggcatgatcttggctccctgcaacctccgcctcccgggtttaagtgcttcttttgcctcagtctcagtagctggcattacaggcgtgcaccattacacccagctaattttttgtatttttagtagagacagtgtttcgccatgttggccaggctggtctcgaattcctggcctcaagtgatccaccctcctccaccttccaaagtgctgggattacagaactgagccaccgtgcccggccctgaaaaccttgataaaggggctcattttctgggaaataaaattacaaggataacaaagatattaaaaacatcatccaagaaatatgtccaaaaaaggttctggtggccggcatcgttgctcacgcctataatctcaacactttaggaggccgaggcaggaggatggcttgagcccaggagttcaagaccagcctggacaacatagggagaccctgtctctacaaaaaaatttaaaaattgggctgggcatggtggcttacacctgtaatcccagcactttgggagaccaaggcaggtggatcacctgaagtcaggagtttgagaccagcctggccaacattagtgaaaccccatctttaccaaaaaatacaaaaattagccagttgtggtggtgaatgcctgtagtcccagctactcgggaagctgaggcaagagaatcacttgaacccaggaggtggaagttgcagtgagctgagattgcgctgttgcactccagcctgggcgacagagtgagaccctgtctcaaaaaaaaaaaaaaaaaaaaattaaaaaattagctaggcacagtggtgcacacctgtgatctcagctactcaggaggctgaggttggatgatggcttgggcctgggaggttcaggctgcaagtgggccgtgatcgtgctactgcactctagtctgggcagcagagcaagaccttgtctcaaaaataaataaatgaaattttaaaaaggctctggcctcagacagtttaatggaagaaatctctcaaactcactgaatagataattttcaccctactaatctgcatcagaacccagaaaagatagaatgctgtctatttcattttatgaagccacaattccccttataccaattcctaataatagcacaggaagaaaggaaaactgaaaaccatactcatcagtcatcagttccaggggtggaaaatcctacatacaattcaagaaaataaaactgtagattattctgtatgaaattaataagccatgagtttgtcaactgagaaaaaaaaacaattatcataatagatgccaaaaaaatcagtcaaaaatgaatacccaaaaagaaccctcctaattaaccaggaacagttgaaattaagaattatgtattaccggccaggcacggtggctcatgccttaatcccagcactttgggaggctgaggtgggtagatcacctgaagtcaggagtttgagaccagcctggccaatatggtgaagcctcatctctactaaaaatacaaaaattagctgggtggggtggcaagtgcctgtaatcccagcgactcaggaggctgaagcgggaggatcacctgaacttgggaggtcgtgactgcagtgaacagtcatcatgccactgcacaatgcagcctgggctacagagtgagttgccatctcaaaaaaaaaaaaaaaaaaaaaaaagccacgtgagatgtgagttcctgtttccctacagcctcaccagcataggatatcattagtcttttaaatatttgttttaatcacgtcttctttgccccatagctgacggaggggttcccactctcatgtgatggcagtggccaaacacaacacctgacactgggcaggtgagattaaccgcagtttattagttacaacatactcaatgggaaaggacaccacaagccacgcagggccacacagggggtgtactcaggagtgaagagaacaaccaggggttgtggagggcaggctttgtagtgataagagagtgaggtgctccctggttcctgcatgggaggtaactggcttgtttgaataattctacaggctggcagggaactgaagcctactactaagagataagcaggaactgctcctggttcatttgatgaaaggattggctaggggaccttacccacagaacacagcaggagggcagcttacagctagaccatttgaggccctcttgattttaccagaagtcaagtcaatagttctttttattttttacatttttatttatttatttatttttgagacagagtctcactcttcttgcccaggctggagtgcagtggcgcgatcttgtctcactgcaacctccgcctcccgggttcaagtgattctactgcctcagcctcccgagtagctgggactacggcatttactagcatgtccagctaatttttgtagtttttgtagagacaagcttttgccatgttttccaggctggtctcaaactcctgagctcaagcgatccacctgagagctgagcactcccacagtgctgagattacaggtgtgagccactgcacctagcctcacatagcattttgagggtataaattggtacaaccttttgggaggacaatttggtagtatataaaaatatgaaatgtgtatatccttggacccagcaatctcatttcttgggaagagataccatcacaaataatatgatgtatgtctgaagacagtcactaatgtactgaatgtaaaagtaaaaaaaaaaaaaaaacctcctaaatacatcaatctattaatagaagattgattaaatgaattacaaggcatccaatgcaatgtaacaatagacagctattaatatttaaaaggacatggatgcctatgtgttgacacagaaagatgactacagtaagtgaaaaaagctgtggcatatcatatgtatacctatcaacctactgtactctaatttttctattattattttttatttattgagcagcccccaaagcagagagtcctcctactctttttttttttttctttttttgagatggagtcttactctgtcaccaagactggaatgcagtggcatgatcttggctcactgcaacctctgcctcccgggttcaagtgattttcctgcctcaacttcccgagtagctgggattataggtgcctgccaccatgcccagctaatttttattagaaatttttagtagaaacagggtttcaccatgttggccaggatggtctcgaactcctgacctcaggtgatctgcccgccttggcctcccaaagtgcctgggattaaagatgtgagccaccatgcccagcccctctattctttttcaaagaatatatatgtacgtgcatagaaaattcaggaaagatacatacaagattaaacatgggccaccttgagatggtgggatcataggtcatatggcagaagaaaggagtctaggcactaatgtaatttttgcactttggcacaatcagctcactgcagcctcgaattcctagactcaagtgatcctcctgcctgcctcagtctcctgaggaggcaggactacaggcatgcccagcttccttttaaaaatttttttgtagagaaggggtcttgctaagttgcccaggccggtcatgaattcctgacctcaagcaatcctcctgcctctgcctcccaaagtgctgagataacagatgtgagccaccacagctgggcaaatatttaatatcttaatactttgctatttctacattttcagagcttacctgtttattcgtccacataaacttattttcctttttgactgtctttaaaaatatatttaaaatataaatttaaaaaatcgtatctcttaatactctagagtaagcagaataatgccccccacccaaaatgtccaaatcctaattcccagaacctgtgaatatgttgttacatggccaagcgaaattaaggttgtagatagagttaaggctttgatcagcagaccttaaaataggaagattagcctggattatccaggcaggcccagtgtcatcacaagcgttcttaaaagtgaaagaggacggcagaaagagtgagatggagatgtgactaggaaagaatgatcagagagatgcaacataactggctttgcagatggaagaagggggccatgagccaagaaatgtgggtggcctctagctggaaaagaacctccagaaagggagcacagtccttccttgaaagggagcacagtccttccttgattttagcacagaagacccgcactggacttctatgctacagaagcagaagataataagtttgtgtagttttttgccactaagattcggtcatttgttacagcagcactagaaaatgaatacaaatacataatagacacaacattccttagttgaatgatgaatgaaatcacaaaaaccctaggtctacagataaataggtaaaagaaatatatcacttagggccgggtacggtggctcacgcttacaatcccagcactttgggaggccgaggcaggtggattacctgaagtcagaagttcgagaccaggctggccaacatggcaaaaccccgtctctactaaaaatacaaaaattagccaggcgtggtggcacgtgcctataatcccagctacttgggaggctgaggcaggagaaccacttgaacccgggaggtggaggttgtagtgagccaagatgccactccactccagcctgggtgacagagcgagactctgtcgcaaaaaaacagatagatagacagatagatagacagatagatagatagatagatagatagatagatagatagatagatagatttttttatatatctatatatatatatatcactatgaatccagatagccaataagtagttgaaaacatctatatcctcgctgatactgaagagatgcagatcaaaacctatcaaattaggaaagactattgcaatcctttggggtcctacccaccaagttgtccagaaggggatctgggtttacctctctgagatgactgcttgcagttacctctgaacagcaaattagggggcagacaaggcactttaattcatgctaaagttcgaatgtttgtactaaagccttttatagctatgcttactttatgaggaaatgaaaacttctggaattgggccaaaaattcctgggaattaccagtaaaggtcttgggggttatctaaaccaatataaaagtaactgaaatgattataatccaagaatgctggggtcttttattaccgtttgataagctgatgtgttttttgtttgtttgtttttttgagacagagtgtcaccctgtcacccaggctgaagtgcagcggcacgatctcggctcactgcaacctctgcctcttgggttcaagtgattctcccgcctcagcctcccgagtagctgggattacaggcaccccccaccatgcctggctaacttttgtatttttgtagagatggggtttcaccatgttggccaggctggtcttaaactcctgacctcaggtgatccacccaccttggcctcccaaagtgctgggattacaggcatgagccaccgcacccagccgagctgatgtttatacacacacacacacacatggtccatgaaaaataaaatttaaggctgagtgtggtggctcatgcctataatcccagcactttgggaggctgaggcgggtggatcacctgaggccaggagtttgagaccaggctggccaacatggtgaaaccccgtctctactaaaaaaaaaaatacaaaaattagccaggcgtggtggcaggcgcctgtaatcccagctactcgggaggctgaggcgggagaatcacttgaacccaggaggcagaggttgcagtaagctgagatcgtgccattgcactccagcctgagagacagagtgagactccatctcaaaaaatgaaaaataaataaataaataaatataaaagttaaaggaaaaatatacaaaaaattaaaaactgtattctctttcttaaaactattctttactaattgcacattttacctaagatagaaaatggtttatgtttttcctgtgttccacagggtccccctgtaacatctgattctgtttttatataattgatgcattgtttatatgatactaagggactcatctgtacctataccctgtaagcctcatttcaagatatttagatacaaagcgaaaaggaacacaagtcaccacttcaagtgagtgcctctgcatcatacatgtacatgtgaaacatgtaggtcctttttttttttttggttagatggggtctcactctgttgcccaggctggagtacagtggcgcaatcacggctcactgcaacctccacctcccaggctcaagtgattctcccacctcagcttcctgtagctgggactacaggtgcacaccaccacgcctggctaatttcttttttttggtatagatggggtttcaccatgttgcccaggctgatcttaaactctggggctcaagtgatccacctgcctcggcctcccaaagtgctgggattataggcatgagccactgtgcctgaggcgggaggatcatgctgaaactccatctctacaaaaatacaaaaattggtcgggcgtggtggctcacacctgtaatcccagcactttcggaggctgagacgggaggatcacttgaggtcgtgagttcgagaccagcatgaccaacatggtgaaaccatgtctctattgaaaatacaaaaaaattagccaggcatagtggcacacgcctgtaatcccagctacttgggaggctgaggcaggagaatcacttgaatccaggaggtgaacgttgcagtgagctgagatcacgccattgcactccagcctgggcaacaaaagcgagactctgtctcaaaaaaaaaaaaaaccccacaaaaattagccaggcatgatggcaggtgcctgtaatcccagctactcgggacactgaggcagaagaattgcttgaacccaggaggtggaggttgcagcgagccgagatggcaccactgtccagcctaggtgacagagcgaaagtccatctcaaaaaaaaaaaaaaaaaaaaagacaactgcccaactagacggcaagcacatgtccgcacaactacactattatgtgaacaacacagggaaccgtggagtttagctcaacaaggtgacttgacttaccttgctgagaaacagctaaagggaaatctcttacagcaattgaggaattaagtctcagttactcagttctgaacagttagaacattaagagttttagttttattatattatagatgtgtttttgtgtcatatggtagaaatgtaaatagtaaatgtaaaatagaaagttaaaatgactaaaaaaccagtcagcgtaaatctaccaagctatacgcaaaaggttatatttaaataagtttaatgttacagtattggtatttggtaggttttcttataaggttcccttatccattttgctgtaattaacaatcggataatgtattagccagccaaaaattatgtatgctgtcaggataaatcaagtcaaaatgtttttcaatgtcactacagaaattgtttttggttcaactatatgactatcaaaggttatgtacaacgcacaactctacccagatactcatccttgcactgttctaaataaaggaaacaagactcttcagtactctgtttttcaaactgtaggtcaagatctgttagtgagttgtaaaatcaatttagtcaccattggcaataaaatagaatagagaggcaagtatcaacatgcatcaaaccaaaaggattgtactgtgaaacgcctgcttcatggatctatatgcatacatgcacacataagaaaatggatttcttactaagagatactgttaaaagagtctgaaaacacagccttagtggaatagctgtctctaatcttggggctgaggcatgcacgcatgaagacttgagggatattctcaaatagtccagtggcttgtggagggagaagttgatggtataatgacaatttgtgggataaagtgatgtaaaggtttaagaaatgagttaacagattcaaaacactaagtaaataaacattcccacttcttccccacccagacttaacaaacatagctcagatctctgggctcagaccttcccagccaggtcccagcctccttttccagctttgtctctcatttgccctggcctttcctccacccaacactccatgctcccctcagggaaccacaggccttattctccactccagatctctgcacctgtcctccttctagcctggaaggcctctcctattatccactggtccctttcatacactccagcatctggctgtgcacttgctagcttgtgattgattggtctctctgtcagattaataccactgcactggccgggcgcggtggctcaagcctgtaatcccagcacttagggaggccaaggcgggtggatcatgaggtcaggagatcaagaccatcctggctaacacggtgaaaccccgtctctactaaaaatacaaaaatattagccgggcgtggtggcggacgcctgtggtcccagctactcgggaggctgaggcaggagaatggcgtgaacccaggaggcggagctttcagtgagctgagattgcaccactgcactccagcctgggcgacagagcgagactctgtctcaaagaaaaaaaaaaataccactgcactaacccctacttgtggctggggccatgttttgctcactgtacttccctagggtgttcaaaatcatgccttgtactcagtaagctccccataaattacgttattttttaacaacatatttcagatgtgtttaaatacttttctgttacaaagattcaatacaggctgggtgcagtggtacacggctataatcccagtgctttgcgaggccaaggtaggaggatcacttgagcccaggagttcgagactaccatgagcaacatagtgagatcccgtctctaccaaaaagagaaaaaatatatatatatattagctgggcatggtggagtgctcctgtagtcctagctactagaaaggctgaggtgggaggatcacttgagcccagaagtttgaggcagcagtgagccatgatcacaccactgtactccagcctgggcaagagtgagactctgtctcaaaaaacaaaaatccaacatgcatccagtatcagtatcactgtggtagcctgggggaatcactgaactgccaccatattaccggtggcttcacataacccagctactttagctccacataacccagctattttagctccttttcttgaggtttagcatgagccaaggatacacaaggccatctaggactctttatgttttgttatagaaaagtttaaacatgtaggaaaatagatggctgggtgcagtggctcatgcctgtaatcccaacactttgggaggccaagataggtggattgcttgagctcatgagttcgagaccagcctaggcaacatggcaaaaccccatctctacaaaaagttaaaaaattagccgggcatggtggtgcacacctgtaagtcccagctactcaggaggctgaggtgagaggatggcttgagcctgggaggcagaggtgcagtgacctgacatcgtgccactgtactccagcctgggcaacagagctagatcttatcctaaaaacaaaaacaaggccaggcgcggtggctcatgcctgtaatcccagcactttgggaggccgaggcgggtggatcatgaggtcaggagattgagaccatcctggctaacacagtgacaccgcgtctctactaaaaatataaaaaattagccgagcgtggtggtgggcgcctgtagtcccagctacgcagaagactgaggcaggagaatggcatgaacttgggagacggagcttgcagtgagccgagatcacgccactgcactccagcctgggcaacagagcaagactctgtctcaaaaaaacaaacaaaaaaaccagaaagaagaaagaaaatgagcacaacctccatgtacccattcccagtttttcagtaattttcagctcatggttaatcttgtaaataactattttttgaaaaattgtgtaatataactccaatctagaacttgtcaataataagccttgaagatccacaagaaagagaagttactggactctatagggcgcaagtagtatcacaatagacctgtgtagggctgggctgtgaagataaggcacccaggacaagcactgcttgagagttacaaaaatcaaaatgtatctgattggttggagccaagagtcaagggttccaaaatctaactatgaaaaagggaccaccaggctgggcacggtggctcgtgcctgtagtcccagcactttgggaggccaacatggtgaaaccccgtctctactaaaaatacaaaaattagccgggcatggtggcatgtgcctgtagtcccagctacttggaaggctgaggcagaatcgcttgaaccctggaggcggaggttgcagtgagctgagatcgcgccactgcactccagcttgagtgacagagtgagactgtctcaaaaaaataacaatactaataaaaaaagaaaagaaaaagggactacccaacaagtaaaagactcaggtagaattccaatgaagttggctgggcgtggtggctcatggctgtaatcccagcactttaggaggccaaggcgggtggatcatgaggtcaggagttcaagaccagcctggccaacatagtgaaaccccatctctactaaaaatacaaaaaattagcagggcgtggtggtgggcacatgtaatcccagctacttgggaggctgaggcaggagaatcgcttgaacccgggaggtggaggttgcagtgagccgagatcacgccattgcattccagcctgggcgacagtgcgaggctgtctcaaaaaaataaaaataaaataaataaaaattggccgggcgcggtggctcacacctgtaatcccagcactttgggaggcagaggcgggcagatcacgaggtcaggagatcgagaccatcctggctaacacagtgaaaccccgtctctactaaaaatacaaaaaattagccaggtgtggtggcgggcgcctgtagtcccagctacttgggaggctgaggcaggagaatggcgtgaacctgggaggcggagcttgcagtgagccaagattgtgccactgcactccagcctgggtgacagagcaagactccatctcaaaaaaaataaataaaaaataaataaataaataagtaaaaatgaaaaagaattacaatgaagtcttgagtccttggttctgaatcatcatccatcagtcatagctatgtcctcagctatcacggtaaccctggcgctccagagtaagtgaaaactaccctcagacaaaaataaaaattaaaggccaggtgtaggggttcacgcttataatcccagcactttgggaggccaaggtgggcggatcacctgaggtcaggagtttgagaccaacctggcaaccatggcaaaatcctgtctctactaaaaatacaaaaaattagccaggcatggtggagggcgccagtaattccagctattcaggaggctgaggcaggagaatcacttgaactcgggaagtggaggtttcagtgagctgagattgcgccactgcacccctgcctgggcgacagagcgagattccctctctaaataagtgaatcaataaaatttaattagagctagcaaggctgggcacagtggctcatgcctgtaatgcagcactttgggaggctgaggcggggggatcacttgaagtcaggagtttgagaccagcctgcccaacatggcgaaaccccgtctctagtaaaaatacaaaaattagccaggtgtggtggcgcatgcctctaatcccagctatttgggaggatgaggcaggagaatcactgaacgtgggaggtggaggttgcagtgagccaagattgcgccagtgcacttctgcctaggtgacagtgagactccaactcaagaaaaaaaaaaaagtagagcttgtgaagtgtttatgatcagttttagtgtcacatgtacagatcagtaatgtaatcattataatactatgtctggtctacggctgggcgcggtggctcacgcttgtaatcccagcactttgggaggctgaggcaggcagattgcctgaggtcaggagttcgagatcagcctggccaacaaagtgaaaccccgtctctactaaaaatacaaaaattagctgggagtggtggcacgctcctgtaatctcagctactcgggaggctgaggcaggagaatcgcttgaacctgggtggtggaggttgtagtaagccgagatcactacagcctgggcaacagagcgagactgcctcaaaaaaaaaaaaaagcattaaatttcattttattttcatttttccctttattttttcattttttagttgtgaaagtagttcgtatatatttagaaaaatgtttacttttaataaactattcatttaataaatgtattaactgagcactaaataatgctcaaaggatcatagatttttttcctccacactaagcccatgggacatgaagaatatctgggtgcttccaggatataaggaaggaatgtgccttttcccactcctggcctttgggtactgtcctgagcatgggatgctggggcaggggctgccttggccatcttgccatctgcatggcagtggcagaggatagctgagggaaaggactagagagccctggagctgccgccttgctctgtgagaagccccttccaatggagatttgaattacttgcaacttgttggcctgcctctccaccccacccccatctgttccctagctctcaactttggctgcacactggaatctcctactcatgctccctgactatgccctcacagattctgatttgactggtcctgggtgcaacggggctggcatgagacgactaaaaactccccaggtgaatccaatgagcaaccaggctaaggaccagtgatctaactgtaagtcattctcttcttttccctttgtaattttatgtttccacctcatactgtggttggctacatctgtttcttccctctcctactagaatgtaggctccagatggccttccaaacaatacatgtggcccttcacgctccaggtgatgacaagtacccgttgctgatggaagtagcagagtcatacctttcttggaatttaggttctacagtcaatgcttatggcacccaatgagtcaaaaacacccttggcaactcctaaggaaggctctgccctggaacctgatgtactgtttccccatcaccatccagggagagtttcctcctgggccggaacagaaagctgcctcctccatcaggcaccagaggaagtagggggcttctgtttagggaccactttgcataaatacacatttaaacatgtgcctcaccctcagcacagcaggatgctcacgccatgaacagccaacaggaaccagagtgaccgaccctccaggaggtacacacctccctcccatcccacccacttctgagcatatggttctcacatccaccagtgggtggaatcacccacaccatttaaactttttgtcaaggatgtagagctgaattcatgtgatttcccacatgagcaatgtccctccctccactgcacaattatagccagctcaagcaggtcctctccttccttctacctgccctgcaaatggctctctccttcactgaccccccgccctccttcttaaaggctgatgctccctaggactctatccttgatgcttctcattaattcttctccccgctggctctcagccctacttagggctcctgatcagttaaaaaagacccatgagacctcccctccccagttaacagagatgtggcccaagaggctccccacttctaatttgagtgggggcaaaagaagagaaagatcttatctaggtcttgggggcagggcttgcagggcacaaagaaacagagtaaatgtgcaacaggctattttcttgaatgaatggattcataataagaacaggacttcaccagcttccaagggaccctccccacctctcggatatattctgaagcctaaatttcacctgcttatctaggatcctaggccaggccttctgccacaccaagccacaccaagctcagcagtactcacaggcctttaatctataactgcctggccacaccatcacttccccaggatggtggggagggatgaagatgtatagccaggtaggccacaccaactctgagtccaagagggaaggactggggtcaggctggggcttgggcaggggactcccggccccaggcgatgagggagttgctggcttgggcaagctcggcgatggacacccggccccgctgtcggatgaagttggccacggcggccagttcctctggggttatgtagatgaacttgccccggtcgtcaatcacacctgtggggacatgcaggttgtggggctgaggcctcctgggcgttccccatctggcctgagaatgcccacctactccttcacagctggctcagggcccttccggcctcctgcctgcctggactttcctggctgcatccagtcctgctaggagagtcgaatcaggctgccctgcctgtcctctcccactgctgccacctccaggccctggcatgtcctccttgtaactgcatccagctactcagtgcccctccttgcacacccctccccccatcttgggtggtcatcctgcctctgcagcacatccctgcagcccctgtggctagacactctccaaggccaggactgcagtgattggctctcatcatctcacctgttatagtcccctcagccagcaggtcctggatgcgatttatggtgtcctatgaggagaacaactctcagaatagagataggcaccaatgtccccagaaaaagcactgaaacctccctcccactacagccaaatctctttatttccctctcatgccacgcccaaatgtgactctgtgctttgcctttggaagggccctgggtagaaggggctctggtcctgggccctgcaagacccccaaaagagtatctcttcctgttagaagcggggcagtgatgtttgcaacacaggctggtgcagtctgtgcatgagagttgtcaaggtaactgatttgggctgctttggtcacaggggctggcagagtgatggggtttgggttttttttttctttcctgcctgttcgtccattaaaaatgcaggattcccagggtgccaggagacttctgtgcactactcactcttggttggggacaaggtagacggtgcatcaagactctatctttagggcaggtcctctctgctagccacagacccctggccacactgcacacagcaggccacgttccagggcttacctgagtgcgtaggcccacctgggaagccaggtcttccaagagcacaaccttggactgctacaaaaagaaggaggaaaagaaagagaggctgagcttgggcaaatccctctaagcatgggcaccctccaggtttgcattctgatctgatctgttctcggtggctggaaaaacactgtacacactcctgtaggacagccttgctcccctgacacacacacacacacacacacacacactcactatcacccattgacagagacccgcacaatcataaaccctctcattccccttcttgcgaggaaggaatctacccaaaacaaccacctgcctcatgggccctgtcctggactccgagacacacgagtggtaatcagagcacagcagccaccatcctctgcatccagccatctctttttaacatcatggacaagttcaaggggacgcaccatagggaggaaggaggcggtgagagtcaccaaaagctattttaaataactgtcaccaggacttatgcttgctgaggacctactagaacaaggccctgagaaggtaggagggacacatgctgaacaagccatagtccccgccctggagctcgcagtccggctggtgagacaggtgagtacatggacaagagggagagcagataaaagcccgagcaagccaaggtctctcagtagaggctgtgggggcccactcctgccttgccttcgctggccgccccactggcctggtcccccacaacctgacacacccacactttttatccatcctctttataccatctgaggcactgagcccacccttgaaatcactgtcactaataccgctgagtgctttccagcacagccacgttctgtgctccaagtgcttcttcataccctcagtagaaacctgagttcccaagggcgcagcgaagggtccaccgctgtgtccacacaggcacctgcccccactaccccaacacacagcacaggacttgagaaaaggcagttcttttgcatttctgtgaatcctccaccgcaaatgagctgggggaggactgacatggtgacacctccctgactgcagatagcatgtgacttgtttgaaatgccaaagccgtatgtacaagcaagaaggcaagcgagaggcagctgggtcaggatgggcaaggacaaagtgacgtggtcagctggtctctacctacaaaacagggatcaggcagcgggctctcagtgacagtgtggtgcgagaacatgaagtcaccccaggtgctccctgatgacctggcctgaggtgctgctggggccaaaacacgtttgataaaacaagctaggtgtggtggcacccacctgcaatctcagctactcaggaggcagaggcaggaagatcgcctgagcccagccatggtcagacaggagaatggaacaagatcgagtgaaccctacacctctcataaacgatgctgggtgcaggcatgttcctccagttctgaaatcttaaggcaaaaaaggtctatccccttggagcaaggaggaaagcagacagactgaatttcagaagtcctccttttccttgcaagacagcagctctagaagaattagccagcacaggctggaaaaactttttttcttttttttttgagacagagtctcactctgtcgcccaggctggagtgcagtggcaccatcttgcctcactgcaacctccacctcctgggttcaagtgattctcctgcctcagcctcctgagtagctgggactacaggtgtgcaccaccatgcctggctaatttttgtatttttagcagagatggggtttcagcatgttgcccaggctagtctcaaactcctgacctcaagtgatctgcccgcctcggcctctcaaagtgctgggattgcaggcgtgagccaccatgcccggacaagctggaaaaacttctaagctccaaaagagtttggagaactcccagagaatagttacctccagggagccaccaaaagtgagggctagaactggggacctttcttctggtttctgcagagtaaagggggatgttgaagctgaccccctcctctaattccacctgggaaggcttcctggggaggggcttcaggaccatcttactgcctactgggtaggtggggacaagttccaaacagcagcaggcaagtgtgagaaataacctgcccggccacagcccctaatcaagtgtgccagggtagagagagggctccatgagaggggagtgcacacagcctgaacagacaggaccctctcaaagctgccagcatttcccccacttaagaaccccagactcaaggctgtgagcccagcccctcgctgctggcaggcgtctaaaccctgctctctttcaggagaggtggcgggaggattatgcaagccctgggtccttggcagcccctggtagcacccccaccaccgcccccgctccctctgcactccttccctcagccgcctctgcacctctgagttgcacttgaaaacctctcccctcatggcatccttcgtgggagagaagttgcttagcagcaaagcaaagtaggatgtgcttatgcaacctggagcagcatcgaggcggcctgcgcagtggctgcggacagaaggggacacactgccgccccaccctaaactccaaaggaaacaccatcctgttccccctgaaagacccaagttcccagtcaggagcacatggcagaggatgcttgtttcaactcagtggagcctcagtgtgacagaactgacagaaaacacatgtgaagagacttgaaaacacactgactcactgagcgtggggtctgaagagcagggaaactgtcaaactgagtgtgaggaagtgatcaaaggcttgcgcctcccacacagacccaggtccttctccaccttcggggttggagggagagaaactctcctggccaggaccctgcggctctgcccctctgggcccccctgtccactcctgcatgagcctgaatgccctgcctgcagcccccgctggaggcatccaacctgcacatgccaggcagggagctgacactcaggctctgttcagtggcttcttaccttgatgtagttgatgaactctgtcaggaagctctgggactagagaagcagagaaatcagggtgagcaccccctagcaagcccacagggttctgtacccattcacccaagtaccacctgctcacttgagggccacctgcctgcagcctgcctttggcccgcccaaccacctgcacataccgcttgcctacacaagcagcagagccttccagggtgagagtttcggaggcaccagcctctgctgaggacaaggcctctggccactaaagcctgctggtactgatgcccacccacctctcactgcctggccaggggcgtctgggatggggtggctagccttgcgtctggcacaggctgcactgatgggtgcagagaggggcttcccaggggcagcaggcccacctgttcctcagtcatggtctctcctacgccttcctcctccaccacaaaggcctccttcagtttcaggtactcctcatgctcccgctgggcctgctcctcgcgggccttcctctcctcctcctcctgtggacataggaggcaaaagtcaggtatcgggggcagaacagggcaggcacctgttctggttgctgctacccctgcaggacaccagagcatatagcccagccttttctcagagacagagctccttcaggacccccatttctccattcccccaagctgaaccatgggccgaggcccctcttgtcatcggtttcatcatcacctggacaaatgctgctcagccccttctcccgccctccgtgctcaggggatcttagcaaaaatctgttgaaaaccctgccatgaccccactctacaataccctccaatcacctgccccatcctctccttgtgtaactcaccaagcataccccgtcatgtccacacctcataagcaaatgtgaaccctgcatttcctcaccacccactcacccagtcagcccactccagtctggcttctgtgttcccagttctatgaaacaactcctgccacagtctcacccatgccctccactcaccaaactcaaggtacaaccttcaggtctcatatgtctgtcctctcagtgatccttctttcctcccttggcttccagatcccaccctctcctggatttcctcctgctccttgggccattcttcccgcctccttcatcattcagccctgcctcttctctctcctccacattctctgggccacctcgcccatgcccaaagcatcaaccccttccttgccagtgactaccacacttgtagccccacccgaatctcttctcccaaacacacaacggtccatgtgacacagctactgggccatctcacaggcagcagacagaccctgggacctactcttctacgtttagacctcctcctaggtccctggctctgtgaattaacacagccaactggtcagaaatgaggtcctattgaccccttctttctctaacttccagaaaactccctggtctgtctatgttgctccatcaccactactgcctggtaaaacagcctccctcaacccaacacattttccagagcactcagaaaaatttttaaatggaaagctagccgggcgtggtggctcacgcctgtaatcccagcactttgggaggccaaggcgggcggatcacgaggtcaggagatcgagaccatcctggctaacacggtgaaaccctgtctccactaaaaatacaaaaaaaaaattagccgggcgtggtggtgggcgcctgtagtcccagctactcgggaggctgaggcaggagaatggcgtgaacctgggaggcagagcttgcagtgagccgagactgtgccactgcactccagcctgggggacagagcgagactccatctcaaaaacaaaaacaagaatcagaaagctaaagctgaggcaagtaatatacaagatgagtctggggcatcttgcagtgccagaaactaagtgctcaaaaaacaaaacgagtgtgtgttaaaggtacacaggagccaactgaaagggctcccaatggtcaaagctggaacaatctcaacaacgtaataaataacgttactggattataacacaaagtacaaaataaatactcatgagtctatacaaatataaaaaaaatggctggtcgggcacggtggctcacgctggtaatcccaccactttgggaggctgaggcaggcggatcacctgaggtcaggagttcaagaccatcctggccaacatggtgaaacctcgtctctactaaaaatacaaaaattagctgggtgtggtggcgggtgcctgtaatcccagctactcgagaggctgaggcagcagaatcgcttgaacctgggaagcggaggttgcagtgagcccagattgcgccactggactccagcctggatgacagagtgagactccatctcagaaaaaaaaaaaaaaaaaaaaaagactgcatgaatatttaatgaatagggaaggagagacatatctcctgtaagagatttccatataatttatgtaagaactctaactccccaacccttaagtgtgggctgtgcacagtgacttctttccaaagaaatacgggaagaggggaaaaaaacagtcacattacagtggagaaagctggcaaacaaaaccgcagccaggcgaccaaggttaacaacattagggacaagtgaagcggataacttgcatatttggtatgttgcattgaagatggaacttcacttattgtcttcttcagtcagatccataaccccagtctaaccatgagaaaaacatcaaccaaactcaaattaagggaccttctacaaactacttgcccaggactcctcaaaattgttaaggctggacacagtggctcacacatgtaatcccagcactttgggaggctgaggtgggtggatcacctgaagtcaagagttcaagaccagcctggccaatacggtgaaaccccgcctctaccaaaaatacaaaaattagccaggtgtggtggtgcacgtctgtcatcctagctgcttgggaggctgaagcaggagaatcatttgaaatctgaaggtggaggttgcagtgagctatcgcgccactgcactccagccttgagagcaagactgtatctcaaaaaaaaaaaaaaaaaaggttaagatcatcaaaagcaaggagtcttagctgggcacagtggtgcacacctgtagccccagctactagggaggctgaggcaggaggattgcttgagcccaagagtttgaaggtgcagtgagcactccagcctgggtgagagtgagactccatctctcttaaaaaaaaaaaaaaaaaaaaaaaaaggccgggcacagtggctcatgcctgtaatcccagcactttgggaagccaaggcaggaggatcacaaggtcaagagattgagaccatactggccaacatggtgaaaccctctctctactaaaaatataaaaattagctgagcgtggtggtgcacctgtagtcccacctactcgggagaatgaggcaggagagtcacttgaacccaagaggcagaggttgcagtgagccgagatcgtgccactgcactccagcctggagacagagagggactctgtctcaaaaaaaaaaaaaaaaagcctggtgcagtggctcacgcctgtaatcccagcgcttcgggaggctgaggtgggtggatcacctgaggtcgggagttcgagaccagcctgaccaacatagagaaaccccgtctctactaaaaatacaaaattagccgggcgtggtggcacatgcctgtaatcccagctacttgggaggctgaggcagcagaattgcttgaacccaggaggtggaggttgtggtgagccaagatgatgccactgcactccagcctaggcaacaagagtggaactccgtttcaaaaaaaaaaaaaaaaaaacaaaacagaaattctgataaactgtcatgacacagaagagcctaaggagacatgaccactaaatgtaacatggcatcctagatgggaccctggaaaagaaaaaggatactgggaaaaaacaaataaaatatgaataatggggtcaggtgtggtggctcacacctgtaatcccagcactttgggaggccaagggaagagaattgcttgagtctaggaattcaaaagcagcctgggaaacacggtgaaacccaatctctaccaaaaaaaaaaaaaaaaaattagccaggcatggtggtgcacacctatagtcccagctactcgcagggacggggaactgaagtgggaggattgcttgaggctgggaggcagaggttgcagtgagccaagatcgtgccattgcactccagcctgggcaacggagcaagaccctgtcttaatcaatcaataaagaaaaatctgaataatgttagagtttagttaacaataatgtgtcaatattagttgtgaggaaggtattaaagtgaggtaggacgttaaggataagggaaactggttacaggggagaagagccaggatatttaaggtacattaagcgggaccaatattcagaaaggaaaaaaccctctctgctaatgcctcccccatgctgtattctggcttatcagccacagcacccacatccaggcttcctgccatccaggatcctgggacaacaggtcagtcagaggtcacaggtcttcccagctagggcagccctggctctaaccctatgtaccccacatctttatggtgttctctttttgggaaacctggttctcagaacaaagaaagcatctggcaaacaaatgttcattagtcactactgcagtggaccccattccctgagcaccttctgtatgccaggccctcgatgtaagaaccatctcttacaatgatcttcctcagcctcaaggccttcaggatccagacccccatcacctctctgccatcttctcctcctctcctggctttctctgcccagctatcctcctcgcctcgcgttcctcacatgctccccgaaagttcaatagtcacgtgcacaaaaatccccactccaggctctgcttttcagcagtggcttttctaggctgtggtggagcctagggaccaaataaaccaggacctgcccttgtgccaggtctatggcccaccttctaggttggaggtgccagggagctgcataagaagcaaggctgccttgcctggtcaagggtcagaggtcagggtaggggctggcctcaccttctgctcctcctccaggcgaagccgctcctcctccttcttccactcagcttcgcgctgggactcgagtcgtttccgctcctcacgttcagcctcctctgcctggagagaggtcttcataggggcacatccctcacccccggctagagtgtgcccaccgcccagacagactagggaaggcaatgcctgggccagggcacagacccaggcggcaggagacagagccagggaagcagcaaacaccagcccagcaggcaacaagccctcagtctgccttagggaaaaaggaaggcagtgccctttcgcacttcccagagctgcaccccatccctccggcttgcctcacgctgggcctttcgcgcttgtttctcctccagcttccgcagtttcttagctccaattttccccgacaggtgagtttccgctggcttctcgacaccttcctcctcctgggctgggtatggtcaaagaaagacagttcaggttctgaccagagaggactgatgacgatggatccccaacccctcgtccctcccctaacagggggatccccttccacccacctgcaaatgtcactagcccagctctgccctccagaggcatctgccatgagtgcgtgtgtgtgtgtgcatgaatatgtagggatgggagaacggtgaggggcccatagggcaagggaaaagatgagaactttaggccgggcacggtggctgaagcctgtaatcccagcactttgggaggccgaggtgggtggatcacaaggtcaggagattgagaccatcctggcaatcatggtgaaaccccatctctactaaaagtacaaaaaagggctgggcacggtggctcatgcctgtaatcccagaactttgggaggcaaaggtgggcggatcacgaggttaggagatcgagatcatcctggctaacatggtgaaacctcatctctactaaaaatacaaaaaattagctgggtgtggtggcgggcacctgtagtcccagctactcaggaggctgaggcaggagaataatgtgaacccaggagccggaacttgcagtgagctgagatcacgccactgcactccaacctgggcgacagagtgagacactgtctcaggggaaaaaaaaatacaaaaataattagccgggcatggtggcgggtgcctgtagtcccagctactcgggaggctgaggcaggggaatggtgtgaacccaggaggcggaacttgcagtgagcggagatcgcgccactgcactccatccagcctgggcgacagagcgagactctgtctcaaaaaaaaaaaaaaaaaaaaaattagccaggtgtggtggtggccacccgtagccccagctactagggacgctgaagcaggagaatggcatgaacccagcaggcagagcttgccgagatctgctgccaagtggtgtgagccgagatcacgccactgcactccagcctgagtgacagagcaagactctgtctcaaaaaaaaaaaaaaaaagatgagaactttagatattgcatagccacaaagaaggaggtatcagattaaaatatgcaagtgtctcggggtcacagatagcgctgcctggatatttaaggtactgtggctgataagccagaatacagcataggggaggcattaggagagagggttgttttttttggtttttttttttttgagacggagtctcgctctgttgcccagggtggagtgcagtggcgcgatctcggctcgctgcaagcaccacctcctgggttcacgccattctcctgcctcagccttccgagtagctggaactacaggcgccagccaccatgcccccctgatttttttatttttatttttagtagagaccgggtttcaccatgttagccaggatggtctcaatctcctgacctcgtgatccacccgcctcggcctcccaaagtgctgggattacaggcgtgagccaccatgcccagcccagagagggttttttttgtttgtttatttgtttttggagacggagtctcgctctgtcgcccaggctggagtgcagtggcgcgatctcggctcactgcaagctccacctcccgggttcatggcattctcctgcctcagcctcccaagtagctggaactacaggcacataccatcacgcccggctaattttttgtattgttagccaggatggtctcgatctcctgacctcgtgatccaccctccttggcctcccaaagtgctggaattacaggtgtgagccaccacgcccggcccagagagggttttttacctttctgaatgctggtctcacctaatgtaccttaaatatcctggctaatgaactccagagttctctggcttctgtctctggtgccaaacccccaggcaagggaagtcccatgaggaaatttatcccgcctcaaatctgaaatcctcctcacaatcgtcaggagttgctgaggattctgggcttagtccctggccaggattatccctttgcccatcaaaccctggctgaaatgacagtcccaacactatgactacctcagggccagctgcaagttaaagacccactgatgcctgtgcagcaagggtctctgaacccaagtctgagccagaaggtacggcaaagaaagggcctcttcttgagctaaagggataatccccaaaggtacaaggcaaaagcctcaaatgcccccagtttctgagaaacgcccagacgccccctcctcaggctcaagccagctgccaagtactggagaagacaatcctgagggctctcctggtctcctggaagcagggatatggaggcctctgtgtcaacagaatgtctctatctttaaactgttttcctggggttgtgggtgaccccactccaggaactgcagaaactcttggccaggcactctgcctctagggtgaaatcctcagggaataagtgtgcccataacaggaagggtgcgaggatagaaggggtgaattgaggaacattctgaatcaaactgaagacccttgccctctgcttggacactgagagccaagatgaaggtagggggggttgacccagtggaacaaatgccaggtcccaagtccccccctactctaccgtgtggctcccagacgtccctcctaccctgaggcttcataccctactcccccacttagctttgggggcccttttatccccccctccaacccaaaccctctccccaccaggctgggcccctctcacctaggatgacagcttcctcctcgttctcatctgcttctgcccaggccacccgctgggctcgacgctgggcctgtaggcggctgcccaggtccctccggcgccgaggcctgcctccagctctcggctcctcaggctccaggggcccaggctgggccacccggcctgctcctgccagctcctcattgtgcagtggctcttggccggctgtagggaagacagaaatgacaatgctgcctataagcccagcccggcccatggcaggaggagcggcagcccggaagcctcacctcctctgcttagcggcctgctgcccacagcacaaggccccgacttctcagtctgactggcaaggccttttccaccaggcccacagcttggtcccaggcgggggctcagcccttccctcgggcctgtgtgaatactcctctcccctcccggctccacctttccagctggcctgtcaggaggcccctatcctgatgtccccagctctcatcgagtaccccctgcaggaatccactgatttctcgcctaacaccacctgtggttttatctggctccccagccagagagtacacttcccggcggtggccgagcctcccccgggaagacctgctggatctccgccttccctcagcgtgtcccttccgctcctgggagcgcgcaggtgctcagaggtagcttgtgggcccagggagcaggaaaacacatatacaaacccgcccgctgaccagaaatggggggaaagagggaggatgggtgtatctgttctgtgccctggccaatgacatggccttctgatcggggagcggattggggagggagagtgggccctctccttggcgggaagggagagagcttcaggaatttcctggagccgcctcgcgcttctccagctcgtgggggacaggcagaaaatattcagatgcccccttcctggcacctgctctggagccaggctgggaggaatggaaaacccctgcggcctccctaacaggtgcagagggaaagggccccgacggtgacggatgggagtgtgcgccggccagggcctcaggcctttggaggtatggagttcccgggggtgaagagagggatgaggccagactctggcttggagtcgagagaaaggggtagcggcgcggccaccgattccaggtagggcactgcggaagccccacccggcacacgactagcgcacggacgcgcatgcgtcccgcccgcccaggtgcgcacgcgcaggagccgcggcgcgacggtccacaaaggctcagaaggccagaaaacccggtaccaccaaccctggtgcagcggcatctcctacctgatgccgcccggccccggctgcgagtcaggaagaggataaagccgactagcagagccgccgctaccaagtaccacacaggcgccaccatgacgagggcctcagtgcagaaccactgcgtccaccctgaggccgggatctcataggccccgcccctatttcccaatctagactccgcccactactcggagccccgcccagcggcacatcacagagaggctttaatgtcagacattaaaatgagtttggggggtgtaaagaaacccacaatgttaagaggaaattatagcagacggtatgtccagtagaaaacatctatgtatgttttttttttttgagacggagtctctgtcgcacaggctggagtgcggtggtgcgatctcggctcactgcaacctccacctcccaggttcaagcgattctcctgcctcagactcccgagtagctgggattacaggcgcccgccaccacgcccggctaatttttgtatttttagtagagatgggggtttcaccgtgttggccaggctggtctcgaactcctgaccttgtgatccacccaccttggcctcccaaagtgctgggattacaggcgtgagccaccgcgcccggactatatatgttttaaaaatcactaaacaatcccacatagtgtttatggaaacaaccgtggaaaaagtacgaaaagaggcttgggactgatgcacaccaacttcaggatagcgattacctctaggaggagggaagcgggttggggttttgctgtatctgtgacactgaatttctttctttctttctttcttttgaggggaaggggaggggaggggagggcagtactggaatttattaagctttttgtatacatgataacagaagtaaagatttatttcaggagccaggcacagaggctcgtctgttaacccaatactttgggaagtctaggtagaggtgagcctaggagttcaagaccagcctgggcaacatgatgaaaccctgtctctacaaaatacaaaaattagccaggtgtggtggcatgcacctgtgattccaggtacttgggaagatgaggtgggaagatcacctgagcccagggaggtcgaggctgcagtgagccatgatcatgccagtgcactccagcctgggtgatagagtgagaccctgtctcagaaaataaaaataaataaaaataaattcaggaccaatgaacaatggtgagaaagggatttgaaaaaatacgggccagatgaggtggctctcccctgtaatcctagcactttgggaggccgaggtgggcggatcacttcaggtcaagtgttcaaaaccagcctagctgacgtgatgaaatcctgtctctactaaaaatacaaacaatgagtggggcgtggtggcacatgcctgtaatcccagctactcgggaggctgaggcaggagaatcacttgaacccagggggcggacgttgcagtgagccaagattgcaccactgcacaccagcctgagcgacagagcaagactctgtctcaaaaaaaaaaaaaaaagaaagaaagaaagaaaaagaaaaagaaaaaatatgggctgggcgaggtggctcacacctgtaatcccagcactttgggaggctgaggtgggtggatcacctgaactcaggagtttgagaccagcctgacaaacacagtgaaaccctgtctctactaaaaatacaaaattagcttggcgtggtggtgggtgcctgtaatcccagctacttgggaggctgaggcaggagaatctctcgaagccgggaggcagaggttgcagtgagccgagatcacactattgcactccagcctgggcaacagagtgagactcagtctcaaaaaaaaaaaaaaaaaaaaaaaagctgggcaccgtggctcacgcctacaatcccaaccaacactttgggaggtcgaggtgggtggatcacctgaggtcgggaatttgagaccagcctgaccaacatggagaaaccccatctctactaaaaatacaaaattagccgggtgtggtggctcatgcccataatcccagcacttcgggaggctgaggcaggcggatcacgaggtcaggagatcaaaaccatcctggctaacacggtgaaaccccgtctctactaaaaatacaaaaaaattagccaggcgtggtggtgggcgcctgtagtcccagctacttgggaggctgaggcaggagaatggtggggacccgggaggcggagcttgcagtgagctgagatcgcgccactgcactccagcctgggcgacagagtgagactgtctcaaaaaaaaaaaaaaaagaagaagaaagatacaaaaattaaccaggcatggtggtgcatgcctggagtcccagctactcaggaggctgaggtgggagaactgctcgaacccaatatgcagaggttgcagtgagccgggaccacaccactgtacttcagcctgggcaacagagcaagactccatctcaaaaaaaataaataaataaaagaatgaaaaagaaagttatctatggacttgtaattatagatgtcagttgtgatctttttgtttgttggttttttgagacagggtctcactcacatcacccaggctagagtacagtggcactcttggctcactgcagcctcgacttcccaggctcaggtgatcctcccacctcagcctcctaaacagctgtgactacaggtgtgtgcccccaagcccaactaattttttgtattttttgtagagactgggtttcaccatgttgtctaggcttgtcttgaactcctgggatcaagtgatccactgtgcccaagctagttatcttacattacagaacacctactatgtaccaggagctgggatttaagaatgagaggtgaggctgggcaccgtggctcaagcctgtaatctcagcactttgggaggctgaggtggagggatctcctgaggtcaggagtttgagaccagcctggtcaatatggtgaaaccccacctctactaaaagtacaaaaattcactgggtgtggtggtgcatgtctgtaatcccagctactcaggaggctgaggcaggagaatcccttgaacccgggagtcggaggttgaagtgagccgagatcgtgccactgcactcaagcctgggcgacaagagcaagactccatctcaaaacaacaacaacaacaacaacaaaacacagtggctgatgcctgtaatcccagcacttagggaggccgaggtgggcatatcacgacgtcaggagttcgagaccagcctggccaacatggtgaaaccccgtctctactaaaaatgcagaaattagctgggcgtcgtggggggtgcttgtagtcccagctactcaggaggctgaggcaggagaatcgcttcaacccaggagacagaggttgcagtgagccaagatcatgccattgcactccaggccaggtgactagagcaagactccgtctcaaaaaaaaaaaaaaaaaagaaaaagagaggtgagcaaaaacagatatggtttttaccattaggatttttagaagagaaaacagaatcacacaaatgaatatctatttgcagtgcagaggtcagtgctatgcaagcagatgaaagggagctcagggaaggttttcctgagctggggcttgagctggctaagatccaagaaaggcatccatgtaaggtgggctgtttttcttcttttcaggctcctcggggtaactgatgtcccccaagccctcctctgcccccaaatccccatggccactcctctagggactctgcataatggttagtgtttctacttcaataaaagaaaacaggtcaccacccaaagcagtggttcccacacattttttttctttttcagacgcagttttgctcttgttgcccaggctggagtccgatggcacgatctccgctcactgcaacccccacctcccgaattcaggcgattctcctgaatcctgaattctctgaactgggattacaggcatgcaccaccatgcccagctaattttgtactttttggtagagatggggtttctccatgttggtcaggctggtttcaaactcctgacctcgggtgatccactcgcctcagcctcccaaagtgctgggattacaggcgtgagccaccgggctttcccacactttgatgagcatcagaatggcctgaggagcttggtaagaactcagactccctccctttcttgtccatgggcagaagtggccattcaagaggtactgacacaggggtccaggcggggggcagagggctgagtctctggaggagggaggtcagatgacttgctgcaaagagagtatcagcagaggttcagcagacccacctttgagagggcacttcctactttctgttgtgtttggaatgcaaagatctggctgaaacggtggccacggagaaggggtgatagatttgagaggctggagggatgaggaagtgaggaactctacatactgagctctcaagcctaggagtgaaaacgggtgagaagtttgggcttgttttaggctatgccgagtttaagttcacagtcgagtggatcatagctggcgggtaaggctgaaggtgagatcaggatgagggtttggaagcccttgcctagaaggaggcagttttttgagacagcataggagagcgcaaacctccagggtcacagggctgcagtcttctcctttcggagaccccattgcagagaagagcgaaagcaggggcggggtgggggtgggagtggtctcttccggttcttgaagatagcgtcccttaggcaggaggggtgggtcactcagtctccaggctcgggaggcccccagcaaatcggacgctgtgggctaggccgccaccgcgagcccactcgcccgatacgcgccttggggtccgggtcggctttccccgggacccctggccggaaactgagccgttcacttccgccaccagccggaagttttctgtcactggacgccaaggagttttcggtggctcagctgggtaaccggggatcaccatggcggcctcattggtggggaagaagatcgtgtttgtaacggggaacgccaagaagctggaggaggtgccgggagggtgttgggggctaactgggaggcggctgggaatagggcggagaaggggcttccgggaggagggaagcacgtgggaggaggcatggagagagaacagaattcagcccggaagaatgggtcctgacccggctgtgtggaaaagctggggcgcaagaagggagtggctgcagaatcggggcgccccggggttggcgagggaacgagggtctcgacagatcccgacacagggcttgtgtggtcagcgactgcgggacccggaggagtagcggggctcttaacaaccgccccgaaggtcacctattgaagtagaccccaacccagtgtcccgacactcttctgggacttatccacatcccgctgctgggccagggctagcaggacccagagagggcgtgggacggagttccacactgagcagtccgtgcctcaccaccgtcctgaaatgttctaacctcttttcgcgtgtgtgaaatggggatgatgcaggacatttgcttcacagcgctatagagaggaggagtaaaggaggcagtggatctaaagtttctgtttgcagggactttgtggctagcaagtaacagaaacacacagggagctcatgtaagccaccagatgactcctgtgggaatatagtgttatcgtgtcccacaggacctgaagttctctcaagaagctgacttgtccttgttctctctggatgctgatccctattcctgttcatatctttcccctttcttccctgctgggggatggaacaatgaggcttctaccagatatcagctccgactggctttgcttgaatcaagagtttgcccctgttcaatcagccatagccatggagtgggggtcatgtgtgggggatcaggatgacacccactggatatgtctgaggcagaccagtggggtgtaatcactagggacacctacatttgcctgtagtgtagggagggactgatgtcactttggtgccaggactgagtggccttctcaggaaccagagccttttgccgaaaaaaggtttgggatcctgaggccagaccagtcaggcagtccaccctgaacagagcccatgcaggacagtgggcatgagaccccaaacctctggctgagaatattgccctca

SEQ ID NO: 233 - DNA, 1621 bp, Homo sapiens
tgcctctgtagagagcgcttcggagagagaggcgaagtaggaagtgggattttctcttccctctcctgggcccgtttgcccctaccctcgcccagcaagctgcgcccaaattctattctgcctctggaaactgctggaccatccaaggtcagctgcctgccctgacccctaccccagggccagcttgtcctcctgggaggcgggacaggccccagtgaggttccgttgtgcgctgtgcctatctctcgattccagggcagatgagccacaacatcaccaccctgccacttacaaggtgggggacctgggtctggggtctcaggcgcaaactggaggccctcacagcccactaggccccctcccaaccccagtaccctcagtccctcagtcaggtggtgctagtagagctatctctgacgctgcaggccccaggtagatgggcagggccctccgtgggtgtgcagcggcggttccctcatcagtccagccactgcccaggactaagggtcttcaaggaagatgaggccattgcccttctccaggtggcttcaccacagtgctgcctgggcacctctctgaggcagagaagtggcccctccctcagtccctgcctggccgaccactgtggcctgcacgcgaatgggtcagagccagaccccggagctggtgctgtccttctaggtggctgctcatagctggggatggtgagtggctgtgttctggccttgcccacgtgggtgtttgcagagacaaaatgaaggggatatgctccccataaataccaccttgccaccacaagaggaccagaaggctactcagccttgctgccacagaaggggatttgtagggtcagcctggctgcagaaaggctggctcagatcttgaccaagaaaccccagcgatttccatcaaagaccacgcaggtaacagaggtgattcctgaagacccagcccacagagggtggcagccaagcatctctgagcagtgtccctgctagcatcgccagcggccatcactctgcctccctcccacctcttgtccctcgtcgttaaaaaacagcaccctatcctgcttccccacatttctgttcctccaatgaagggctaagactatttagtaatctctttcttaagcagaggagtggcaaggatggcaatcttgaattttattttctgtagagatagcatttcttctggtgcggagctgaaaggaatccacccagaagttctgtagcatcctgcgtgcagcctcctggagccccagactccatctgggggagggacttgtttacaagcagttctgaccaccttagtggtgtactgttttctaggcaaaaaatatctgtctgttgtactgtatagcctttaaaatgcagtccaggaatgagactcttttaagaaacacatcctgcttctgcaattccagagagtgctgggggaaaaaaagggataaaaattcctacctactcatcagtgtttgaaagatggagctgaatagcttttcttgttcctggactaggcaatgaataagcaacaatgtatcttttctgtgttcaaaataaatacataatatcaataaaatgtagcaagaagtaacactttcaaaaaaaaaaaaaaaaaa

SEQ ID NO: 234 - DNA, 1167 bp, Homo sapiens
cctagctgccgtcgccgccgccggggctctatggtctctccctagagctttgccgttggaggcggctgctgcggtcttgtgagtttgaccagcgtcgagcggcagcaacatggaggaattcgactccgaagacttctctacgtcggaggaggacgaggactacgtgccgtcgggtggagagtatagtgaagatgatgtaaatgaattagtgaaggaagatgaagtggatggtgaagagcagacacagaaaacccaagggaaaaaaagaaaggcccagagcattccagccaggaagagaagacaaggtggcctctcattagaagaagaggaagaggaggatgccaattcagaatctgagggaagcagtagtgaggaggaagatgacgctgcagagcaggaaaaaggcattggatcagaggatgccaggaaaaagaaggaggacgaactctgggccagcttcctcaatgatgtgggaccaaaatcaaaagtgcccccaagtacacaagttaagaaaggagaggagactgaagagacaagttcaagtaaattgttggtaaaagcagaagagctagagaaacctaaagaaacagaaaaagttaaaatcaccaaggtgtttgattttgctggtgaagaagtaagggtaactaaggaagtggatgctacatctaaagaggccaaatccttcttcaagcagaatgagaaagaaaaaccacaggctaatgttccttcagctctgccatcactccctgccgggtcagggtgagtatttgagtctcactccctgatgtacttggcacgttggagaagctttcagtgcaaatacctactttcgctgcagatcagactccttgcctgagagagagaattatgatgctgctttgcctttgctgcaatatttaccagaatggaagatgcaaaggaaaattagccataactttctcaggaggattgcttgaacccaggagtttgtgaccagcctgggcaatacagtaagaccctgtctcttaaaaaaaaaaaaattagctgggcatggtagcttgcacctctgtcctagctactgtggaggctgaggcaggaggatcccttgagcccagaaggttgaggctgcagtgagccgtgattgtgccactgcactccagcctgggtgacagagagatcctgtctctt

SEQ ID NO: 235 - DNA, 2932 bp, Homo sapiens
gtaatgcagagataataaaacttcttaggtccataggtcttataataatttaataacctaaacatggtatacaaattcctccaaacccaataacataattatagtttcaaaaagttccccaaactttcaagttagattttattgctttgatgagtggctttaaatatgaaaagtcttgcctgtgaagggcaatccttttcccgtggactgggatctatagaaatacagaaatgtgcccaggggttcatctccctaataaccatcattcacatttctcaacctccctaataaccagccaccatgtgagaaggatccacagttactgtttatgactataattaactagtacctgggactggtcagtggagttggttgcaacctgatgctaaggatgtcaaagttgtctcggcctctgttcccagccagtaagtaattccctggcctcgggccataccccctaatcttggtcagctgattatgacaggcagacagcacagtaaataacactatatattaagaaaacccaaagcatatgtatcaatggtatatacccaacagcatcctaggaatggagagtctgtagcaagggcctccaatgtgaaggtcaacacagtcactgtgatgcgtgtatttccattttgtaaagcatgatctctggtggtcatttttatcttcctaacttattggaaaagtctcctgttttgggggcccgcccctggtcacagccagactgactcagtttccctgggaggtcccgctcgagcccgtccttcccctccctctgcccgcccccagccctcgccccaccctcggcgcccgcacatctgcctgctcagctccagacggcgcccggacccccgggcgcgggatccagccaggtgggagccccgcagatgaggtctctgaaggtgtgcctgaaccagtgccagcctgccctgtctgcagcatcggcctgatggggtggtgactgatccctcagggctccggagccatgtggcccaacggcagttccctggggccctgtttccggcccacaaacattaccctggaggagagacggctgatcgcctcgccctggttcgccgcctccttctgcgtggtgggcctggcctccaacctgctggccctgagcgtgctggcgggcgcgcggcaggggggttcgcacacgcgctcctccttcctcaccttcctctgcggcctcgtcctcaccgacttcctggggctgctggtgaccggtaccatcgtggtgtcccagcacgccgcgctcttcgagtggcacgccgtggaccctggctgccgtctctgtcgcttcatgggcgtcgtcatgatcttcttcggcctgtccccgctgctgctgggggccgccatggcctcagagcgctacctgggtatcacccggcccttctcgcgcccggcggtcgcctcgcagcgccgcgcctgggccaccgtggggctggtgtgggcggccgcgctggcgctgggcctgctgcccctgctgggcgtgggtcgctacaccgtgcaatacccggggtcctggtgcttcctgacgctgggcgccgagtccggggacgtggccttcgggctgctcttctccatgctgggcggcctctcggtcgggctgtccttcctgctgaacacggtcagcgtggccaccctgtgccacgtctaccacgggcaggaggcggcccagcagcgtccccgggactccgaggtggagatgatggctcagctcctggggatcatggtggtggccagcgtgtgttggctgccccttctggtcttcattgcccagacagtgctgcgaaacccgcctgccatgagccccgccgggcagctgtcccgcaccacggagaaggagctgctcatctacttgcgcgtggccacctggaaccagatcctggacccctgggtgtatatcctgttccgccgcgccgtgctccggcgtctccagcctcgcctcagcacccggcccaggtcgctgtccctccagccccagctcacgcagcgctccgggctgcagtaggaagtggacagagcgcccctcccgcgcctttccgcggagcccttggcccctcggacagcccatctgcctgttctgaggattcaggggctgggggtgctggatggacagtgggcatcagcagcagggttttgggttgaccccaatccaacccggggacccccaactcctccctgatccttttaccaagcactctcccttcctcggcccctttttcccatccagagctcccaccccttctctgcgtccctcccaaccccaggaagggcatgcagacattggaagagggtcttgcattgctatttttttttttagacggagtcttgctctgtcccccaggctggagtgcagtggcgcaatctcagctcactgcaacctccacctcccgggttcaagcgattctcctgcctcagcctcctgagtagctgggactataggcgcgcgccaccacgcccggctaatttttgtatttttagtagagacggggtttcaccgtgttggccaggctggtcttgaactcctgacctcaggtgattcaccagcctcagcctcccaaagtgctgggatcacaggcatgaaccaccacacctggccattttttttttttttttagacggagtctcactctgtggcccagcctggagtacagtggcacgatctcggctcactgcaacctccgcctcccgggttcaagcgattctcgtgcctcagcctcccgagcagctgggattacaggcgtaagccactgcgcccggccttgcatgctctttgaccctgaatttgacctacttgctggggtacagttgcttccttttgaacctccaacagggaaggctctgtccagaaaggattgaatgtgaaacgggggcacccccttttcttgccaaaatatatctctgcctttggttttat

SEQ ID NO: 236 - DNA, 464 bp, Homo sapiens
aggtcattccttatttcttatttattccctggcacaatcagaccacactacaagtttcttttaccagttgccaaaatgaaatcatgacacccttcagagctactgtcgttacatgcaactcaagacaacgagcagcatcataaccattgtcaacaggcaaactccaacaatgtctgggtttggatttggttttatgttgagagaagcagatttcctctgattttaataatccataagaaacagaaatcataatatattgactccatattacctaaaaagagtcaaaagaagcagaagttctcccccgattcatcctcttgttccacagacattttgaaaataaaagaagacaaaatagaaaggaaaggtgtgagaaagacacagaaatgacttgacgatttaaatcctattaacatcactgggttgattttaccattagactgactgaattagtctcactgtca

SEQ ID NO: 237 - DNA, 5737 bp, Homo sapiens
gtcagatcagggatcattttttttccttcctctactccctcccccctacccgcccctccctccctgtttcccttccctccctccctcccctctctgctgggtctgtgcgctggggcgcccgatcccctccgcagctgggacgctccgaactcgaggcaggagtcggctctccggagcctcgtccctcccttccccttccctgcccccttcccccacccccgactcgggcttggcgcggcggccagaggaaccccgagtcccggcccaggcccctgagctggagggatggaaaactcctctgcagcatcagcctcctcggaggcagggagcagccgctcccaggagatcgaggagctggagcgcttcatcgacagctacgtgctggagtaccaggtgcaggggctgctggctgacaagacggagggtgatggcgagagcgagaggacccagtcccacatctcccagtggacagcggactgcagcgaaccgctggacagcagctgttccttctcccgagggcgagcccccccacagcagaatggcagcaaagacaactctctggacatgctgggcacggacatctgggcggccaacaccttcgattccttcagtggtgccacctgggacctgcagccggaaaagctggacttcacccagttccaccgcaaagtccgacacacgcccaagcagcccctgccacacatcgaccgcgaagggtgtggcaaagggaagctggaagatggggatggcatcaacctgaatgacatcgagaaggtccttccagcctggcagggctaccacccgatgccccatgaagtggagatcgcacacaccaagaagctgttccgcaggaggagaaatgatcgaaggcggcagcagagacctccggggggcaacaagccccaacagcatggtgaccaccagccaggcagtgccaaacacaacagggaccaccagaaatcctaccaggggggctcagcaccccacccctcagggaggcccactcaccatggctacagccagaaccggcgctggcaccatggcaacatgaagcacccaccaggcgacaagggggaggcaggcgcacaccgcaatgccaaagagaccatgaccatcgagaacccaaaactggaggacactgcaggggacaccgggcacagcagcctcgaggccccccgcagccctgacaccctggccccggtggcttctgagcggctgcccccacagcagtcaggggggccagaggttgagacaaaacgtaaagacagtattcttcccgagcgcatcggggagcggcccaaaattaccctgctccagtcttccaaagacagactgcggcgaaggctaaaggaaaaggatgaagtggccgtggagacgaccactccccagcagaacaagatggacaagctgatcgagatcctgaacagcatgcggaacaacagcagcgacgtggacaccaagctcaccaccttcatggaggaggcccagaactccaccaactccgaggagatgctgggcgagatcgtgcgcacaatctaccagaaggctgtgtccgaccgcagcttcgccttcaccgctgccaagctctgcgacaagatggcgctctttatggtggaggggaccaagttccggagcctgctcctcaacatgctgcagaaggacttcacggtgcgcgaggagctgcagcagcaggacgtggagcgctggctgggcttcatcaccttcctgtgtgaggtcttcggcaccatgcgcagcagcacaggcgagcccttccgtgtgctcgtgtgccccatctacacctgcctcagggagctcttgcaatctcaggatgtgaaggaagatgctgtcctttgctgctctatggagctgcagagtacaggccggctgctggaggaacagctgcctgagatgatgacagagctcctggccagcgcacgggacaagatgctgtgcccctcggagtccatgctgacccggtcgctgctcctagaggtcatcgagctccacgctaacagctggaaccctctgacgccccccatcacgcagtactacaacagaaccatccagaaactgacagcctgacagccagggggcctggcaggcggcccacgggcagctggggccctggtgcacagggccagatggacaggcgggaggacaggggtggccctggcgggagaaagaaatggggaggagggcaggcagagtcggtggccagtctggagccagacggggaagggagcaaatccctgagaggagtgcccccgcacaagccccccagcccgagcatgcaagctcacaccaataagggaagcatgtttctttttcctggtggccctggccctccccttcctcactcccgcctctcccctccccatcagacccatcccccacggagctttgtgtgagggatctcatcgctgtgactcctcggagaccttggcagcctcgcacgccggggcaccgcttgggtcagaaaggacctcggaaggctgaaaaagtgggtcggagacgggctcgcattgttcccgcatgctgtcagccgcagtcgccaactggcagcaggcgacgtgtagcagatgtccgggaggacaaaggcaggcacggtccccaccagccgcccgtaattgacggcctttgtcagccatggcagagctgacgctccacctcccacctccaagtcctcctcactgcagcccccacagcctcaggcctagggggtcaggcgcagcgggggagatggagtttgcagttccacttgcactcttttgtttattgtgttttatttttcaaaagtcggttgctttgaagtctctttggccaatgaaaatgcccgtgaggtgatcacacagtcagcactgttgaggacccccggattagtgggagatcaaacccagctcccctctagaagaaggattcgagccacagacagcttgccagtagccaattagggtaattggaaacttctgccccggcggggggtccccgctggaatcctgtgttcctcgccactggcttccagcgcctctgttttctcaaagggctgatactgtcaccactgggaccaagttaaacctggtcctggccccaggggccttgtggcaaacagggcacagaacgagactggcaaattaaaaccaaaattctagatggtgtcttgcgctccacacgcaggtcttactggggaaaaggatgggagtgggggctccccaggactcgattttagctaatgcgctgtgtcactgccccagctcggacgtagaagcccagccctccgtgagctcttgggaaaggggtgaattcactgggtcatggaagggacagtcaggtgaccagcggggtcgccagatgaagcttcccagccgggaaacaagacggggtttcttggcaggccctggtcctggggagcaggccctgttgttggctggagaggaaggtgtggggtggaacaggtgtccacatagctccatctctgggggctggagcacacactttgatgagcccccccggaaatgatgtcagagcctagccgcttccttatttgctcttttattgaggccgggcaggccctgggtcactttggaggcccctcttggtccacactggactggccgggaggtgatgggcggggaaggttctcgtgattgattgattctgagtctgagagtggcgagtggggagaggcttccccagttctctccagctttccctgcagctgcaacctgccctctggtcccaggtgtggagcctttgcctgtctctaaaaagagcctgttggcgacaaggtgtagggggcacaagtttacctgaaacaggtcagtggtctctcccaagaagcgcacgccacctctggtccctggccctgaaccctgccttcttcctccctccacggtttcttcccagactttctcaagctcctcctcactgcccttcctccccagcccagcctgggaacacagatgccccgcgggtaggaggcctcgagggaggagccgggctgatgcggggctgctcagggcaggccccagggcgagcttgccatcgtggccaggcagcctccacctgtgcttcagtggcccctgcccccctgaagcatgtggggtttgtccgctaggaggaggcaaggcccccgaagagaggagagacctgggagtgggagctcaggtcagggaggaggcaggggagtggggtctcccagacccaacggtgagctcagagcaagcttcacgcaggacgctccgaaacactgtgtggagggggctgtgttgtgggcaccttggggcctgattctccttcctccgaacgggctccttgatggcctggccacaggggcagctccccattggctgttaggaccagagtgtgaagaagaagtgaaatataaatatgtatacatatataaatatatttttaattacatgtcgtgtcacggtggctccagacatactgtttgcctagtttattccactgcttgaaagcgcttcctagccaatctgaacaacaacactttaagctgtttttctaaatgcaggttgctgctcctttttcagatatggaaggaaaacgttaagactattttttttttaaagaaacaacagtcaagcctaaaatttgagaccccgaggcagcttcccgagggagactgctcagacaggaactgcaggacagaagtggatgccccacagaccctggccccctccccaagtccatcccctctctgtggcatgaggaaggccgcgtccgagttgacctctgaatgtatgtgatgagaggcagagctggatattgcatttctaaggcttgcattgctttcccctcgcccgcggttcttggcgcatggaagaggcggtccagccatctgatgttgatcctgtctcagtctccccactgcctgtcaggatgagttagtcattgtttttctccgaggcggcctgcttgccacagccctgctccccaaggcctggtggctttgccgaagctctgggaccgcagccccagcgaggcccccaacctcacccagacgaggccaggagccccgccaccctccacgggatgtgcaccctcagaccccattctctctgttcgtccttccttgaccagtctgtaaaccttcactgtttggggatcgtcctgtccatccatgtaaatgtaaatgttggccgagtcggtatttattctgattgatttttattttattctattattttctccgagggatgagggtggggggtgtgggaagggtaccacagatcaggccggggcagctgtaggggcgggggcccagacagccaggccgccaccagagcagccccatggggtgccccagacgcgggcctccaagaagccaagtcccagtctgttttctggcatcagacaccggcccgtgttccttgtcagacagacagactctcaggcctgcctggggagtcgtgtccctcagctgcagggcactgtgttgggaaaccattggctgggcctttgaggacacagatcagaagaaagaaagacaactttcctctgcgcggaacactcacacggaagggctggccgcctccctgagccggctgggagtggacgacaggacctacctccccagagcaagggcctggggcttcccgccaaagctgccgcggaaccccgctagtgcgaccaccctccctccgtcggtatgtcctgctttccagctgaacccaaactacaagtgggtttaaaaaaaataaacaccaccaccaaaaac

SEQ ID NO: 238 - DNA, 1696 bp, Homo sapiens
cagtttctcaagcgaccgatgttgaggtgggaactgaccttgtcccttctgtcacggtgaaggtcacactgcagaacagagtgatattgcaaaaagccaaattatcagtctacgtgcaaccaccattagaattgacttgtgatcagttcacctttgaatttatgaatcgaaatcctgatggcattccgcgagttatccaatgtaaatttagacttcccctaaagttaatttgcctaccaggtcagccttcaaaaactgcaagccacaaaattactattgataccaacaaatctccagtcagtcttcttagtctcttcccaggttttgccagtcagtcagatgatgatcaggtgaatgtaatgggttttcacttcttaggaggtgctcgaattactgttcttgcttccaaaacttctcaacgatatcgcattcagagtgaacaatttgaagatctttggctcataaccaatgagcttattcttcgccttcaagaatattttgaaaaacagggagtcaaagattttgcatgttctttttcgggatctataccccttcaagaatattttgagttgattgatcatcattttgagctacggataaatggtgaaaaattaraagaactcttatctgagagagctgtacaatttcgggccattcaacgccggctactagcaagattcaaagataaaactcctgcccctcttcaacacctggacaccttgttagatggaacctacaagcaggtaattgctctagcagatgcagtggaggaaaaccaaggcaatctgttccagtcattcaccaggctgaagagtgccacccatttggtgattctgctgatcgcgctgtggcagaagcttagtgctgaccaggttgctattctggaagcggcatttctgccgctacaagaagacactcaagaattgggctgggaagaaacggtggatgccgccatttcccacctgttgaagacttgcctgtcgaagagttctaaggagcaggctttgaacctcaacagccagctgaacatacccaaagacacaagccaactgaagaaacatatcaccttgctctgcgatagattatccaaaggtggccgtctctgcctaagtaccgatgcagcagccccacagaccatggtcatgccaggtggttgtactacaatcccagagtcagacctagaagaaagatcagtagaacaagactctacagaactgtttaccaaccacagacatctcactgcagagacacccaggcctgaagtttcacccctccaaggagtctcggaataattcaagtagagttgtttggttgagaggaacatccccatctcaaggccgaacctgtgtgaacctcatgccaagcacagatatagggctggcgcaggtgcttcctaaagctcaccttcctggagatgacatgcatagaaagaggggttgggactttttacttcactaggagaacttgtaacaccatggggaagtcagctgaaacttgtcttgttttgccaggaaaggaagtagttgcctttggtcatccatctgctaatagtcacagaatacagtgaaatgacatagttttgggttagattttataatgcaaagattcagatccaaaataatttcataccccattttttcacagaattcttatatagtaaatgtatcaagtttaataaagcatctcattgtcaaat

SEQ ID NO: 239 - DNA, 719 bp, Homo sapiens
ccaaataatgaaactactattttattcattacaaacatcatataatcattctctataatcactataaaaatttaaatgcttcctttctcctgtatatgaagatggtagttctaaagcaacactctaaaagtgttaaaaagcccattcgtaacacacaccccacctcagtttttgaaagtcagtgcattcagtggttataaataggcatgatgttcttccacagctaagagttctgagtgtcaatccgttgtgtttttttctcccaagggaagacgttcccataactggagcaactgttcaccaacctgaggttctagttcctgcccatccctgcttatctgcactttcttgttgtcattccatggattgagtaaatggtgtgcaaattgaaagggaaggctttcttttcgtatccactccaccttaaatactcctcctagtccagcagagccccagtcctgactcttttcccttccaatctcagaagacatcctagaaaatccctggaaatgtccagatccttgaacagaaaataccaagtaaactatgctgctttcccaaaaggctcgatttagcttccgttcattactaggagttgtagaccagatacccttctgttgagaaattcaaggtttctcaaattgctactcttcattatgaagtttcgaacaggcattttgggtcttggggaaagaaattttgagccccttccttaggat

SEQ ID NO: 240 - DNA, 2129 bp, Homo sapiens
ggctcgcgggggtcccgcgagggtctcggtagccgcgcgcccagagacccccgccgcggcccgattctctgagcgccagacatgaaccgcaagaaactgcagaagctgacggacaccttaaccaaaaattgcaagcattttaataaatttgaagtgaactgtcttataaagcttttttatgacttggtgggaggagtagagaggcaaggtctggttgttggactggatcgtaatgcatttcgaaacatcctgcatgtgacatttggaatgacagatgacatgattatggacagagtattccgaggttttgataaagataatgatggctgtgtaaatgtattggagtggattcatggattatcactgtttcttcgaggatctttggaagaaaaaatgaaatattgctttgaagtgtttgatttgaatggtgacggattcatttcaaaggaggaaatgtttcacatgttgaagaacagccttctcaaacagccatctgaggaagaccctgatgaaggaattaaagatttggttgaaataacactgaagaaaatggatcatgaccatgatgggaagctgtcttttgcagactatgaactggctgtgagagaagagactcttctactggaggcctttgggccatgtcttcctgatccaaagagccagatggaatttgaagctcaagtattcaaagatccaaatgaattcaatgatatgtgaataactaaatgtctatattgtctcaagtgagtaaaaaaggaggcacacacatattgcttattttttctacttagttcagaaaaatgatgttgaattgtgtgtttcagggtgaagatgaggttcacttacatatatcatttaacatcagtgtaagatgcaattaaaatagatggaagacaagaagtcccttattagatgatgggtttggcaagacagttaacttttctacagatgttttatcacatagactatctgtcgaagcacataactggcataaaacctttgggttcattaaatgaatagagagattacataattatgaattgttaatacaaatattctgcatgtcaaaaagaagctgggtgtacactgaaaaatcattgaaactactggatttcctttgaaacaaataatgaagatggcatcaaaagaataagagtattctattgagcattgaaacgcctttctggtaggcattgagggagatctagagagatgaaagatacatggaaatcatattatattgaaatataatatgatttgcattattgtttgaggctttggctaaataacgttactgattgtaagcacctgaaggcaagggttttatccaccacatctttgtctgccatagcatttagtcctctgcatacaatgggctgtccataattactgtagattggactgaaaatcaaaaagtaccacaagataaatgcaaactcttggtgagcagagggagaacatgtactgagtttcttaggtttcatggctaatgcattggcacagctttcagtgtatccctgcagtccttccagatagtccctgccccgtgcattgcagatggttgccaaggcccccctctgtcctggcacccagtgttcctccatcctgactccacgtattgcccccttgccactgcctgagtgcaccatagtgtccccatccccccactgcctggagttccccttgtgtacccccttatcagggcacgacctaactgtgccctgctggctgtgacctcctgaagacagacctggcttctccctgcatccagttccccagtatgtgctgtgggcatcctgagaagcctgaaaaagacagggccaggttaggcttgggtgagctgctttctgccttcttggtacacacagtaagcagtggagaggcgtgttacaccgtatctgttctatcctcatctaaatactgagaggctagttgggatagtaaatctttcttactacatatgcattaagtttaagtaaaatagaatattgtgtgaaaaaatgcactgttactaataaatggaataaacagatccatgaaataaaagaaaaaaaaaaaaaaaaaaaaaaaaaaaaaaaaaaaaaaaaaaaaaaaaaaaaaaaaaaaaaaaaaaaaaaaaaaaaaaaaaa

SEQ ID NO: 241 - DNA, 961 bp, Homo sapiens
actcgttggtgtcctgtggttcgtctcagtcactacaggaccctggggggctgttgccacctccgccgggggcgaggagtcgcttaagtgcgaggacctcaaagtgggacaatatatttgtaaagatccaaaaataaatgacgctacgcaagaaccagttaactgtacaaactacacagctcatgtttcctgttttccagcacccaacataacttgtaaggattccagtggcaatgaaacacattttactgggaacgaagttggttttttcaagcccatatcttgccgaaatgtaaatggctattcctacaaagtggcagtcgcattgtctctttttcttggatggttgggagcagatcgattttaccttggataccctgctttgggtttgttaaagttttgcactgtagggttttgtggaattgggagcctaattgatttcattcttatttcaatgcagattgttggaccttcagatggaagtagttacattatagattactatggaaccagacttacaagactgagtattactaatgaaacatttagaaaaacgcaattatatccataaatattttttaaaagaaacagatttgagcctccttgattttaatagagaacttctagtgtatggatttaaagatttctcttttccaattcatataccattttatgagttctgtataatcgccgcggctcttgtacgtgagttaaggtatattattgggagaatcattcaaattggactccttggaagccgataagagtgttccggcctccgccctatgaaaaaagtcttcccggcaacgctgctaccttccacagggagggtgccctgttgcctttggggccgaacaccagggctccttctcccacgaaagcacaacaccaacccaccccactcacaccccgaccacgcacaaaacggccgcatcagcgcgcccccccttaccacttacag

SEQ ID NO: 242 - DNA, 1802 bp, Homo sapiens
atttttgctccctcccttggctgggcctgaggatttctccgaggaagagatgcaacgtgagtggctagtgtggagcctcagagttggccggaagaggagggaggccagtggagggagagagaggtgtccaggccacaggctcctgaaactttgcagcagtgagttgctgagcacaggtgggacttacacaggcagagcctggctcagctgcccagcccagggacacagtggctcccacacactcacccctagggctgcctgtcgacttgcagtacctgccaccagacaagcagcgagaacctgatgcagacatccgcaagatgcttgttgaagccatcatgctggtgacagccacagcaccaggtcggcagcaggtgcgggaccagggagcctacctgatccttcgagagctgcacagctgggagccggagcccgacgtgcggacggcttgtgagaagctcatccaggtgcttattggggacgagcctgaacgtggcatggaaaacctgctggaggtgcaggtgcctgaggatgtggagcagcagctgcagcagctggattgcagggagcaggagcagttggagcgggagctggccccagagccatgggtggagagggccacacccacctgaggcccctgcagccggacaccagctccagggtcccctttgccaggctttctcagaccaggccttcctgcagctgtctgcaggccccctgggtccccttgttcagagactgtgctcttctgagaagcagagctacgcttaggctccagtaaggattggaggcactttccagccctgtgcagtgttgctaccagcaagaatgaaggttgtgcagagcagtactgtgaggtaggcaccgtgactcggctgcctgtgcagaaggtggaggtggcaggcgatggccagggagccatgagaagactcttctgggcacggcgtggggactggacagaaaaccactgcaagccccaaggagccagctgaagcctcccaatccccagggcactgcagagtctgggcagaggtgggcgcataggtacaagtgctgctttgtcagcctacttccctgcagctctcagctccctgttccctgagacctggccttaaagggctgacccagccatacgtagatcctggggtctttctaggactgtgcctccctgcttgacctatgctccaggaccctgccctcaacccttgtcagctccctaagtcttcctgtttcccagtctcagattgagtgggtgctctcattggcctctctagctaggccgtctccctggtcagcttccttgagcctgggccactcctccctggccttcttacctctgccaagagcctcagatgtgcctgcagctagtccctgcccaagcttctcccccagccaccctctgcccctgtggtagagcccactataggcccaggcgccttacgtgcttctcccctggacctatgtgcatccctcacctgccagttatgtggctgccaagccctacaggctgtcatggtggctcttgccacacttcccttcctgagctgacctgacctcactgccacctcttgcattgggatcctgagggctggcccctgctcactgatgggccctcccaggcccgtcaagccctggtgaaggagcttaagcttggcttcttggcaattcacaatgcctcactccacaccctaaaactggaagcgtcccctatgggtcttcctgcttgtggcttgggtgccggcgttccggcttcaggatctctcttaactggccccaattaaagcttctgccataaaaaaaaa

SEQ ID NO: 243 - DNA, 879 bp, Homo sapiens; identical to SEQ ID NO: 205

SEQ ID NO: 244 - DNA, 2165 bp, Homo sapiens; identical to SEQ ID NO: 81

SEQ ID NO: 245 - DNA, 4984 bp, Homo sapiens
gccgcttcaagctcagcactcacaagatggtgttcatcgtgaactccgaggactacatgtaccgtcgcgggaccctctgccgggccaagcaggtgcagcccctggtcctgctccgccaccaccagcactttgaggagtggcacagccgctgctggaggacaatgtgacggtggaggcggctagcctggtgcaggactggctgatgggtgaggaggacgaggacatggtaccctgcaagacgctgtgtgagacagtgcacgtgcacggcctgcccgtgacccgctaccgcgtgcagtacagccgccgcccggcctcgccctgacccgccctcatgggcaccgggcaggcgcctcacagagcacagacgtgccctcggccttggtcgtgtcggggccgttttcttgaacgacgtgagaggcatctcccagcccctctgctgccggacagcgcactccagggcaggacgccgcccccgtggctcccggtctcctgtgggcctgctgtgtgccaaacctgagctacctgcacccgagccctggggctcagccccaccacaggggcgggtggacgtgctggccgaggaacaagcaatcatgtttgcgtccccgtccgtcacatgtgccaaatccctggcaggcagatggctcctgccccatattcttgccgtgtcttggaaaagtcacaggtgacagccctcctgaggcccacactttggagggggtccatgtccaagagaccctgacaaggaaggagttgagccctgggtaggcttgcttgaaaagtgagtccttccagaatattctcagagctgccagaaacatcatctgagggtttgggcatcagctctgcctggctggtgttcaggccctcagtcactttggaagtgagaagaacccttcagccaaacctttgggatcccattttgaagtccagagctggagcaggcgggcagtgccctgggagaccccgctctggataagacacccaaccccaactccagcagctggactctgggcccacaaggggagggaccccagccagtattccctcagagccggcacgaccctgctgtggggcggcgggcccagtcgtgttcctgcagtgggcaccctaggcgtatgtgtatacacgcacagatatttattcctttcgcttttagtggttgttatttctgtagcagccaagtcctgcggctccctggggctgagatctccctttgtggaactccgagagccgccctgacagtcccagccgccacccaaggagccccatccgcccacccaccctgggacccacgcggccactccagggatcattgttgtccttttgtgaggggctgaggcgactgtcccatggaggcatccaaggctttctgtgccaagaatcccaagtgactggggctggggaccacttctccaggcctctctccccgaccatgagagcccctggccctggcccctgcacaccagtgggcccagaataaccgccacccttgccatcctgcaacagctggactcaagtttccaggaagtggagatgtgtttctagaagtttcctgtggaacctggaggctcctgacgcctttgactccaggctgggcgattccgatgctgacccgtcctcctgggctccccacccccgctccccaagtgtcacacaggcactttgtacacatcctggttttctaagaagggaacttgccatcaagattcctgtaccaggcccacggccgtctcgggcagagccacctgggccccgggtgcagccggagaccccgccgagcccctcctcccagtattcccatccccgcatgcttctagggagcgcctcttttccgttcttgaggaatttctgttctggggcttgtccttcctttgcagctgttttgaatgtagttttccttttctatttatttgcacattaaagttaataattgaatattgaaaaaaaaaaaaaaaaaactcgagactagttctccccccatccctcaaattggcagcaccccagagttacccggtgacctggccaggctctgggcgtgaggccttcaccaatccaagggctattagtacagacgtgtaaatccttccaccccgacccgcacacacacccacactgctgccctggcgggggccatgggggtgatgaatgaccctccaacagccccacatgggttgtttctgtttctttggcttttctcgctccgcagtggagggtttactaggatttaagcttttgagtgcattgagaaccaagacagggcctggctccaactctgtgggccagaggtgggggactgctaggtcgagtctgcagcttcgccagtttcttggttgggacactcctctggcagccccagcaccaccacaaccccttgcagtgtgccccagtcccctggattcgctggactgcaaaaaggagcaccagggaaagctcagcaaaggctcaggaggcctcccgggtcctcgggagatgaagcatccgtgcctaggaaaaggggacagagggcaaggagagaagtgagagctacaattccagcattggagaagcgaggggcggggcgtcaacggcactgcttcaggacgcgcttgctgaaacgactccaacagctagttcacagcccagctttgtacgttggttaccatagctactgctgtcactgtagctgctcccgtagggtcgttgattcctgaacgtatcacatctcacctgcccccttcctcgtgggacgtgtcaagttgactttaaagcctaaggtggcttgtggggactgcaccagaaagtgtctaaccttgtgttccccgaaatcctttctctgacttaggaaccagcgccccctgctggagaagttttttcattttgttagccgacttctggtagcttagcaaagagaccagctgactgtctctcggcccagcccaccacgccgagtagcttgtgtggatgcagtcctgtgagggtgtgcataaccgttcccaggtgtacgcacgcgcgcgcgcgcgcacagacacacacacacacacacacacacacacacacacagtaaccacgggtaggcaccaggggctttgtacattcaggagctgcagagaggaaaggtctcccatgtaccagagaaggaaaagtctgatcccgaaacagcttgaacgaaaggtggttaacacgtgaccaatccccatggcagacagcgggctggtgaacaggaagagcacagaatctctgtggggcgatgctgcagcggctgaaaccacgtcaagtcccccagagcccggcattctatgtaagcatccacctgtgacgccgtggagcaggatcttcattcatctcaccagagcaacagcccagtcctgaggatgggagggacgtgacttagccttgggattccacgctcgccgccctcccttggccgccctactccccagtttcctggcgatgagccatttattgtgtctcacaccagcctcatttccaactccgacttcctacttagaatgtggcagtggctttgtgagtgagaatcctgatgagttttccagtggcctctgcagaagctggcccccttctaagggcatagctaacccccttcccactcctgagtcactgaattcgaggagggtggggcagggaaagggctggcccccctgctgaaatcttgattctgcatttgaggaaggtcagggtgccgctgggggagcagggagcggggagggaggaagaggggaatgcacatcttttgcgccactattaaggcacctgtcaccttacatctcaatctggaatcaaagtgccctgggttgagaagcagacctgggctctggtcacactttggtcactcattagctctaggaccagtcactaatctctgagactccattttctccagggaaacgaggcttgcccagatagactaacaaccctttagtgctccaagaagtgagaatttccgaaaaagatctgccggcccagagcactccctcttgccctaatcctggcagggtctggatgtatttacccaactctgatcttgcgtgcagggatgcttgctgatggatgaaagaccacaataaaacaagattagcagcaaaacaattttaattgtcagtgaaaagcaaacatgtttgtcagactctcctgtggagtcatttcaaatggtaactcttctcttgtaccaggaagcagctgtaggtggggtaatgggatctgtctcctggtgcagaggggcagcttatggcggcagcagcttcaacaagcccgtcccacggccagccctaactgggccaagtgcaagctcctgatgagctgctgggcctggcagcgttccccacttcctagtgccttgctcccctggaattccacagccaatcaaccacagcagccgtgtcctccttgccagaaataacatcattcgtacgtcctgcctttgtaaaaatcaagacccagttaaccatcacccacttcttgcccctgattgatggggtccctgagtacaagcgtcctgtgcaatcccctccctcctaccgctttcctagctaagccctgctagccccacaaatcagaatctgggtttggggtgctggagagatggtgggccccagctcttccccacatagcccacgctgctcagggcacggtctccaaccaggctcgagattgcctgcctgcccgctgcagccgcagggccccaccctgtggaaaaggaagcttcccccactcaactgcactgtccttttctgctgtctagtctgtgctaagggacactacttgtacacttttcaaacggtgccctaaattggaagagaaggaggggccaggaacacagccctctccgccgtctttctccacctccacttcaccactcctgctctagacttcttgtcttgcatctttgataacttggagtcataaccgagtggatgtcggaataaatgagagatttgaagtagaaaaaaaaaaaaaaaaaaaaaaaaaaaaaaaaaaaaaaaaa
